(19) United States
(12) Patent Application Publication
(10) Pub. No.: US 2024/0124874 A1
(43) Pub. Date: Apr. 18, 2024

(54) C/EBP Alpha Short Activating RNA Compositions and Methods of Use

(71) Applicant: MiNA Therapeutics Limited, London (GB)

(72) Inventor: Pål Sætrom, Trondheim (NO)

(73) Assignee: MiNA Therapeutics Limited, London (GB)

(21) Appl. No.: 18/088,395

(22) Filed: Dec. 23, 2022

Related U.S. Application Data
(63) Continuation of application No. 16/814,210, filed on Mar. 10, 2020, now abandoned.
Application No. 16/814,210 is a continuation of application No. 16/224,863, filed on Dec. 19, 2018, now Pat. No. 10,633,659.
Application No. 16/224,863 is a continuation of application No. 15/038,332, filed on May 20, 2016, now Pat. No. 10,202,601.
(60) Provisional application No. 61/907,732, filed on Nov. 22, 2013.

(51) Int. Cl. C12N 15/113; A61K 31/7105; A61K 45/06; A61K 47/54; A61K 47/64

(52) U.S. Cl. CPC C12N 15/113; A61K 31/7105; A61K 45/06; A61K 47/549; A61K 47/64; C12N 15/1135; C12N 2310/11; C12N 2310/113

(57) ABSTRACT

The invention relates to saRNAs targeting a C/EBPα transcript and therapeutic compositions comprising said saRNAs. Methods of using the therapeutic compositions are also provided.

### CROSS-REFERENCE TO RELATED APPLICATIONS

[0001] This application is a continuation application of U.S. Non-provisional application Ser. No. 16/814,210, filed Mar. 10, 2020, entitled “C/EBP ALPHA SHORT ACTIVATING RNA COMPOSITIONS AND METHODS OF USE”, which is a continuation application of U.S. Non-provisional application Ser. No. 16/224,863, filed Dec. 19, 2018, now U.S. Pat. No. 10,633,659, entitled “C/EBP ALPHA SHORT ACTIVATING RNA COMPOSITIONS AND METHODS OF USE”, which is a continuation application of U.S. Non-provisional application Ser. No. 15/038,332, filed May 20, 2016, now U.S. Pat. No. 10,202,601, entitled “C/EBP ALPHA SHORT ACTIVATING RNA COMPOSITIONS AND METHODS OF USE”, which is a 35 U.S.C. § 371 U.S. National Stage Entry of International Application No. PCT/IB2014/003054 filed Nov. 24, 2014, entitled “C/EBP ALPHA SHORT ACTIVATING RNA COMPOSITIONS AND METHODS OF USE”, which claims priority to U.S. Prov. Application No. 61/907,732, filed Nov. 22, 2013, entitled, “C/EBP ALPHA SHORT ACTIVATING RNA COMPOSITIONS AND METHODS OF USE”, the contents of each of which are incorporated herein by reference in their entirety.

### SEQUENCE LISTING

[0002] The present application is being filed along with a Sequence Listing in electronic format. The sequence listing filed, entitled 2058_1008USCON3_SL.xml, was created on Jan. 27, 2023, and is 1,009,315 bytes in size. The information in electronic format of the Sequence Listing is incorporated herein by reference in its entirety.

### FIELD OF THE INVENTION

[0003] The invention relates to polynucleotide, specifically saRNA, compositions for the modulating C/EBPα and C/EBPα pathways and to the methods of using the compositions in therapeutic applications such as treating metabolic disorders, hyperproliferative diseases, and regulating stem cell linage.

### BACKGROUND OF THE INVENTION

[0004] CCAAT/enhancer-binding protein α (C/EBPα, C/EBP alpha or C/EBPA) is a leucine zipper protein that is conserved across humans and rats. This nuclear transcription factor is enriched in hepatocytes, myelomonocytes, adipocytes, as well as other types of mammary epithelial cells [Lekstrom-Himes et al., J. Bio. Chem, vol. 273, 28545-28548 (1998)]. It is composed of two transactivation domains in the N-terminal part, and a leucine zipper region mediating dimerization with other C/EBP family members and a DNA-binding domain in the C-terminal part. The binding sites for the family of C/EBP transcription factors are present in the promoter regions of numerous genes that are involved in the maintenance of normal hepatocyte function and response to injury. C/EBPα has a pleiotropic effect on the transcription of several liver-specific genes implicated in the immune and inflammatory responses, development, cell proliferation, anti-apoptosis, and several metabolic pathways [Darlington et al., Current Opinion of Genetic Development, vol. 5(5), 565-570 (1995)]. It is essential for maintaining the differentiated state of hepatocytes. It activates albumin transcription and coordinates the expression of genes encoding multiple ornithine cycle enzymes involved in urea production, therefore playing an important role in normal liver function.

[0005] In the adult liver, C/EBPα is defined as functioning in terminally differentiated hepatocytes whilst rapidly proliferating hepatoma cells express only a fraction of C/EBPα [Umek et al., Science, vol. 251, 288-292 (1991)]. C/EBPα is known to up-regulate p21, a strong inhibitor of cell proliferation through the up-regulation of retinoblastoma and inhibition of Cdk2 and Cdk4 [Timchenko et al., Genes & Development, vol. 10, 804-815 (1996); Wang et al., Molecular Cell, vol. 8, 817-828 (2001)]. In hepatocellular carcinoma (HCC), C/EBPα functions as a tumor suppressor with anti-proliferative properties [Iakova et al., Seminars in Cancer Biology, vol. 21(1), 28-34 (2011)].

[0006] Different approaches are carried out to study C/EBPα mRNA or protein modulation. It is known that C/EBPα protein is regulated by post-translational phosphorylation and sumoylation. For example, FLT3 tyrosine kinase inhibitors and extra-cellular signal-regulated kinases 1 and/or 2 (ERK1/2) block serine-21 phosphorylation of C/EBPα, which increases the granulocytic differentiation potential of the C/EBPα protein [Radomska et al., Journal of Experimental Medicine, vol. 203(2), 371-381 (2006) and Ross et al., Molecular and Cellular Biology, vol. 24(2), 675-686 (2004)]. In addition, C/EBPα translation can be efficiently induced by 2-cyano-3,12-dioxoolean-1,9-dien-28-oic acid (CDDO), which alters the ratio of the C/EBPα protein isoforms in favor of the full-length p42 form over p30 form thereby inducing granulocytic differentiation [Koschmieder et al., Blood, vol. 110(10), 3695-3705 (2007)].

[0007] The C/EBPα gene is an intronless gene located on chromosome 19q13.1. Most eukaryotic cells use RNA-complementarity as a mechanism for regulating gene expression. One example is the RNA interference (RNAi) pathway which uses double stranded short interfering RNAs to knockdown gene expression via the RNA-induced silencing complex (RISC). It is now established that short duplex RNA oligonucleotides also have the ability to target the promoter regions of genes and mediate transcriptional activation of these genes and they have been referred to as RNA activation (RNAa), antigene RNA (agRNA) or short activating RNA (saRNA) [Li et al., PNAS, vol. 103, 17337-17342 (2006)]. saRNA induced activation of genes is conserved in other mammalian species including mouse, rat, and non-human primates and is fast becoming a popular method for studying the effects of endogenous up-regulation of genes.

[0008] Thus, there is a need for targeted modulation of C/EBPα for therapeutic purposes with saRNA.

### SUMMARY OF THE INVENTION

[0009] The present invention provides compositions, methods and kits for the design, preparation, manufacture, formulation and/or use of short activating RNA (saRNA) molecules that modulate C/EBPα gene expression and/or function for therapeutic purposes, including diagnosing and prognosis.

[0010] One aspect of the invention provides a pharmaceutical composition comprising a saRNA that targets a C/EBPα transcript and at least one pharmaceutically acceptable carrier.

[0011] Another aspect of the invention provides a method of modulating the metabolic pathway of a subject comprising administering a saRNA that targets a C/EBPα transcript to said subject.

[0012] Another aspect of the invention provides a method of inhibiting the proliferation of hyperproliferative cells comprising contacting the cells with a saRNA that targets a C/EBPα transcript.

[0013] Another aspect of the invention provides a method of treating or preventing hyperproliferative disorders comprising administering a saRNA that targets a C/EBPα transcript to a subject with said hyperproliferative disorder.

[0014] Another aspect of the invention provides a method of regulating epithelial-mesenchymal transition of a cell comprising contact the cell with a saRNA that targets a C/EBPα transcript.

[0015] Yet another aspect of the invention provides a method of regulating stem cell differentiation and pluripotency comprising contact said stem cell with a saRNA that targets a C/EBPα transcript.

[0016] The details of various embodiments of the invention are set forth in the description below. Other features, objects, and advantages of the invention will be apparent from the description and the drawings, and from the claims.

### BRIEF DESCRIPTION OF THE DRAWINGS

[0017] The foregoing and other objects, features and advantages will be apparent from the following description of particular embodiments of the invention, as illustrated in the accompanying drawings in which like reference characters refer to the same parts throughout the different views. The drawings are not necessarily to scale, emphasis instead being placed upon illustrating the principles of various embodiments of the invention.

[0018] FIG. 1 shows the primary effects of C/EBPα on the liver.

[0019] FIG. 2 shows the secondary effects of C/EBPα on the adipose tissue.

[0020] FIG. 3A to 3G are a series of histograms illustrating the effects of saRNA of the present invention. FIG. 3A shows transfection of C/EBPα-saRNA in HepG2 cells positively regulates expression of C/EBPα gene; FIG. 3B shows Transfection of C/EBPα-saRNA in HepG2 cells positively regulates expression of albumin gene. FIG. 3C is a dose escalation of C/EBPα-saRNA demonstrates a dose-dependent effect over 96 hrs on C/EBPα gene expression. FIG. 3D is a dose escalation of C/EBPα-saRNA demonstrates a dose-dependent effect over 96 hrs on albumin gene expression. Panels E-G (FIG. 3E-FIG. 3G) show the D site of the albumin promoter (albumin D-box) binding protein (DBP), and albumin (ALB) all have one or more C/EBPα binding sites. The panels show the genomic region containing (E) C/EBPα, (F) DBP and (G) Albumin (ALB) 2000 nucleotides upstream and downstream of each gene. Shown are the chromosomal coordinates (“Scale” and chromosome identifier), C/EBPα binding sites (“CEBPA”; black boxes), occurrences of the C/EBPα binding motif (“GCAAT motif”; black vertical lines), and RefSeq genes within the genomic regions.

[0021] FIG. 4A-4F illustrate studies of the methylation status and effects on gene expression. A-B shows methylation assay of the CpG islands at the promoter regions of (FIG. 4A) C/EBPA and (FIG. 4B) DBP demonstrated reduction in methylation when compared to control. FIG. 4C: An enzyme linked immunosorbent assay (ELISA) specific for human albumin detected a significant increase of albumin secretion following transfection of 20 nM C/EBPα-saRNA. FIG. 4D: Expression of the gene encoding ornithine cycle enzyme Ornithine transcarbamylase (OTC) increased in C/EBPα-saRNA transfected cells suggesting an improved ability of urea production. FIG. 4E: Decreased expression of the gene encoding alphafetoprotein (AFP) in C/EBPα-saRNA transfected cells suggested improved regulation of cell differentiation. FIG. 4F: C/EBPα-saRNA caused a marked down-regulation of HepG2 cell proliferation at different concentrations.

[0022] FIG. 5A-5F illustrate the results of in vivo studies of the saRNA of the invention. FIG. 5A-FIG. 5F: Intravenous injection of C/EBPα-saRNA in male Wistar rats with chronic liver cirrhosis and spontaneous hepatocellular carcinoma. C/EBPα-saRNA-dendrimer was tested for nuclease sensitivity in rat serum for the indicated times. A Significant decrease of saRNA in the blood was observed between 24 and 48 hours. Rats were then treated with C/EBPα-saRNA-dendrimer for one week with repeat dose every 48 hours. Albumin, bilirubin, aspartate transaminase (AST), alanine transaminase (ALT) levels were measured. Increase in circulating levels of albumin suggests amelioration from liver injury when compared to control.

[0023] FIG. 6A-6C illustrate whole tissue and histochemistry studies of the saRNA of the present invention. FIG. 6A: Liver tumor volumes were visibly reduced in C/EBPα-saRNA-dendrimer injected rats when compared to control. FIG. 6B: Tumor burden was assessed by the volume of all tumor nodules with a diameter in excess of 3 mm. C/EBPα-saRNA injected rats had significantly reduced tumor burden after two weeks of treatment. FIG. 6C: 2 μm liver sections from control, scramble-saRNA injected and C/EBPα-saRNA-dendrimer injected rats were immunostained for expression of placenta-form glutathione-S-transferase (GST-p).

[0024] FIG. 7A-7G illustrate the results of in vivo studies of the saRNA of the invention. FIG. 7A-FIG. 7D: Total RNA extracts from 7 control rats v.s. 7 C/EBPα-saRNA-dendrimer injected rats were analyzed for (FIG. 7A) albumin gene expression, (FIG. 7B) C/EBPα gene expression, (FIG. 7C) hepatocyte nuclear factor (HNF) 4α gene expression, and (FIG. 7D) HNF1α gene expression, An increase in these factors confirmed up-regulation of the transcription factors required to promote expression of albumin. Decreased mRNA levels encoding HGF. FIG. 7E-FIG. 7G: Total RNA extracts from 7 control rats vs 7 C/EBPα-saRNA-dendrimer injected rats were analyzed for (FIG. 7E) hepatocyte growth factor (HGF) gene expression, (FIG. 7F) hydroxyphenylpyruvic acid dioxygenase (HPD1) gene expression, and (FIG. 7G) plasminogen gene expression. Decreased mRNA levels encoding HGF indicates positive regulation of cell proliferation. Increased levels of HPD1 and plasminogen indicate improved function of hepatocytes.

[0025] FIG. 8A-8C show identification of binding sites within promoters. A ChIP-Seq analysis of STAT3, c-Myc (MYC) and interleukin 6 receptor (IL6R) genes show the presence of C/EBPα binding sites within their promoter regions. FIG. 8A-8C: Transfection of C/EBPα-saRNA reduced relative expression of STAT3 (A), cMyc (B) and IL6R (C) in HepG2 cells.

[0026] FIG. 9A-9D illustrate results of a methylaztion assay and Western blot. FIG. 9A-FIG. 9C: A methylation assay of the CpG islands at the promoter regions of STAT3 (FIG. 9A), MYC (FIG. 9B) and IL6R (FIG. 9C) demonstrated hypermethylation when compared to control. FIG. 9D: A Western blot analysis showed decreased phosphorylation of STAT3 at residues 705 and 727 and down-regulation of IL6R in cells transfected with C/EBPα-saRNA.

[0027] FIG. 10: C/EBPα expression in huh7 liver cell line was tested with control, C/EBPα-saRNA alone, different dendrimers, and C/EBPα-saRNA-dendrimer complexes with different saRNA:dendrimer complex ratios. Samples were often in duplicate.

[0028] FIG. 11: C/EBPα expressions in HepG2 cells were measured with C/EBPα-saRNA-dendrimer complexes that were incubated for different periods of time.

[0029] FIG. 12: Serum albumin levels in mice were tested for a week after injection of C/EBPα-saRNA-dendrimer complexes, 3× does and 100 uL per injection.

[0030] FIG. 13A-13G: Proliferation study. WST-1 cell proliferation assay results for fibroblasts (FIG. 13A), HL60 (FIG. 13B), K562 (FIG. 13C), Jurkat (FIG. 13D), U937 cells (FIG. 13E), U373 (FIG. 13F), and 32DZ10 (FIG. 13G) cells after C/EBPα-saRNA transfection.

[0031] FIG. 14: Cell proliferation of HL60, U937, fibroblast, Jurkat, K562, U373, 32Dp210 cells after C/EBPα-saRNA transfection.

[0032] FIG. 15A-15F: Proliferation study of the saRNA of the invention. FIG. 15A-FIG. 15F: Cell proliferation of human HCC (HepG2) (FIG. 15A), rat liver cancer (FIG. 15B), human pancreatic epitheloid carcinoma (FIG. 15C), human breast adenocarcinoma (MCF7) (FIG. 15D), human metastatic prostate cancer (DU145) (FIG. 15E), rat insulinoma (MIN6) (FIG. 15F) cells after C/EBPα-saRNA transfection.

[0033] FIG. 16: Cell proliferation of MIN6, fibroblast, MCF7, HepG2, rat liver, Panc1 and Du145 cells after C/EBPα-saRNA transfection.

[0034] FIG. 17A-17B: Effects on cholesterol. FIG. 30A-FIG. 30B: C/EBPα-saRNA altered circulating levels of cholesterol (A) and LDL (B).

[0035] FIG. 18A-18D: Gene expression and serum cholesterol study. FIG. 18A-FIG. 18D: CEBPα, CD36, LPL and LXR expression in rats treated with C/EBPα-saRNA carried by dendrimers and controls.

[0036] FIG. 19: Serum cholesterol levels of rats treated with C/EBPα-saRNA carried by dendrimers and controls.

[0037] FIG. 20A-20O: Effects on gene expression. FIG. 20A-FIG. 20O: CEBPα, SREBF-1, CD36, ACACB, APOC3, MTP, PPARγ-CoA1α, LDLR, PPARγ-CoA1β, PPARγ, ACACA, MLXIPL, PPARα, FASN, and DGAT2 expression in liver cells of rats treated with C/EBPα-saRNA carried by dendrimers and controls.

[0038] FIG. 21A-21M: Effects on gene expression. FIG. 21A-FIG. 21M: SREBP, CD36, LDLR, PPARGC1A, APOC, ACACB, PERC, ACACA, MLXP1, MTOR, PPARA, FASN, DGAT expression in BAT cells transfected with C/EBPα-saRNA.

[0039] FIG. 22A-22M Effects on gene expression. FIG. 22A-FIG. 22M: SREBP, CD36, LDLR, PPARGC1A, MTP, APOC, ACACB, PERC, ACACA, MLX1PL, MTOR, FASN, DGAT expression in WAT cells transfected with C/EBPα-saRNA.

[0040] FIG. 23: C/EBPα, C/EBPβ, and ‘self renewal’ transcription factors relative expression levels following C/EBPα-saRNA transfection.

[0041] FIG. 24: C/EBPα, C/EBPβ, and NANOG relative expression levels following C/EBPα-saRNA transfection.

[0042] FIG. 25: C/EBPα expression levels in U87-fLuc cells 4 days after transfection with C/EBPα-saRNA (CAW1) or transduction with C/EBPα-saRNA in a miRNA design cloned into clinical retroviral replicating vector (miCAW1). Scrambled siRNA (con) and retrovirus vector delivering a small inhibitory hairpin against firefly Luciferase (mifLuc) used as negative controls.

[0043] FIG. 26: C/EBPα-AW1 miRNA insert sequence (SEQ ID NO: 383) and common miR-30 context (SEQ ID NO: 384).

[0044] FIG. 27: Serum albumin levels in cirrhotic patients treated with MTL-501 (C/EBPα-saRNA-dendrimers).

[0045] FIG. 28A-28F: Expression in DU145 cells. FIG. 28A-FIG. 28C show CEBPA, ALB, p21 mRNA expression levels in DU145 cells with 50 nM C/EBPα-saRNA transfection. FIG. 28D-FIG. 28F show CEBPA, ALB, p21 mRNA expression levels in DU145 cells with 10 nM C/EBPα-saRNA transfection.

[0046] FIG. 29A-29D: Expression in DU145 cells. FIG. 29A-FIG. 29B show CEBPA and ecCEBPA mRNA expression levels in DU145 cells with 50 nM C/EBPα-saRNA transfection. FIG. 29C-FIG. 29D show CEBPA and ecCEBPA mRNA expression levels in DU145 cells with 10 nM C/EBPα-saRNA transfection. E shows ESTS of CEBPA mRNA, AW665812 levels in DU145 cells with 50 nM C/EBPα-saRNA transfection.

[0047] FIG. 30 shows CEBPA, ALB, p21 relative expression levels in DU145 cells after transfection with modified C/EBPα-saRNA.

[0048] FIG. 31A-31G: Proliferation and time study. FIG. 31A shows reduced proliferation for CEBPA-saRNA treated HepG2 cells. FIG. 31B-FIG. 31G show CEBPA, p21 and albumin mRNA levels in HepG2 cells at different time points after C/EBPα-saRNA transfection.

[0049] FIG. 32A-32G: Proliferation and time study. FIG. 32A shows reduced proliferation for CEBPA-saRNA treated DU145 cells. FIG. 32B-FIG. 32G show CEBPA, p21 and albumin mRNA levels in DU145 cells at different time points after C/EBPα-saRNA transfection.

[0050] FIG. 33A-33G: Proliferation and formulation study. FIG. 33A shows reduced proliferation for CEBPA-saRNA treated AML cells. FIG. 33B-FIG. 33G show CEBPA, p21 and albumin mRNA levels in AML cells at different time points after C/EBPα-saRNA transfection.

[0051] FIG. 34A-34F: Formulation study. FIG. 34A-FIG. 34F show CEBPA, ALB and p21 mRNA levels in DU145 and HepG2 cells after formulated NOV340-CEBPA-saRNA transfection.

[0052] FIG. 35A-35F: Study design and outcomes. FIG. 35A shows a flow chart of in vivo studies of formulated CEBPA-saRNA conducted with DEN rats. FIG. 35B shows tumor burden at day 12. FIG. 35C shows serum bilirubin levels at day 12. FIG. 35D shows ALT liver enzyme levels at day 12. FIG. 35E shows serum albumin levels at day 12. FIG. 35F shows cholesterol levels at day 12.

[0053] FIG. 36A-36B: Western blots. FIG. 36A and FIG. 36B show western blot results of in HepG2 cells transfected with biotin-labeled CEBPA-saRNA.

[0054] FIG. 37 shows factors involved in HCC and liver failure.

[0055] FIG. 38A-38E: Expression study. FIG. 38A-FIG. 38C show CEBPA, albumin and p21 mRNA levels of HepG2 cells after CEBPA-saRNA transfection. FIG. 38D-FIG. 38E show CEBPA and p21 mRNA levels of DU145 cells after CEBPA-saRNA transfection.

[0056] FIG. 39A-39G: Expression study. FIG. 39A-FIG. 39D shows CEBPA, albumin, p21 and GAPDH mRNA levels in HepG2 cells transfected with different concentrations of CEBPA-saRNA. FIG. 39E-FIG. 39G show CEBPA, p21 and GAPDH mRNA levels in DU145 cells transfected with different concentrations of CEBPA-saRNA.

[0057] FIG. 40 shows ALB, CCND1, CDKN1A, CEBPA, CEBPB, ecCEBPA, MTOR, MYC, STAT3 AND TP53 relative expressions in HepG2 cells transfected with CEBPA-saRNA.

### DETAILED DESCRIPTION

[0058] The present invention provides compositions, methods and kits for modulating C/EBPα gene expression and/or function for therapeutic purposes. These compositions, methods and kits comprise nucleic acid constructs that target a C/EBPα transcript.

[0059] C/EBPα protein is known as a critical regulator of metabolic processes and cell proliferation. Modulating C/EBPα gene has great potentials for therapeutic purposes. The present invention addresses this need by providing nucleic acid constructs targeting a C/EBPα transcript, wherein the nucleic acid constructs may include single or double stranded DNA or RNA with or without modifications.

[0060] The terms “target” or “targeting” in the context mean having an effect on a C/EBPα transcript. The effect may be direct or indirect. Direct effect may be caused by complete or partial hybridization with the C/EBPα transcript. Indirect effect may be upstream or downstream.

[0061] The terms “C/EBPα transcript”, “C/EBPα target transcript” or “target transcript” in the context may be located on any strand of the C/EBPα gene, an antisense RNA of the C/EBPα gene, C/EBPα mRNA encoding C/EBPα protein, or a non-coding RNA regulating C/EBPα gene expression. One example of a non-coding RNA regulating C/EBPα gene expression is a long non-coding RNA (lncRNA). The antisense RNA of the C/EBPα gene is called a target antisense RNA transcript herein after.

[0062] In one embodiment, nucleic acid constructs targeting a C/EBPα transcript modulates C/EBPα gene expression and/or function.

[0063] The term “modulate” in the context may include upregulating or downregulating C/EBPα gene expression and/or function.

[0064] The term “gene expression” in the context may include the transcription step of generating C/EBPα mRNA from C/EBPα gene or the translation step generating C/EBPα protein from C/EBPα mRNA. An increase of C/EBPα mRNA and an increase of C/EBPα protein both indicate an increase or a positive effect of C/EBPα gene expression.

### I. Composition of the Invention

[0065] One aspect of the present invention provides pharmaceutical compositions comprising nucleic acid constructs that target a C/EBPα transcript, and at least one pharmaceutically acceptable carrier. One example of such nucleic acid constructs is a small activating RNA (saRNA), referred herein after as “C/EBPα-saRNA”, or “saRNA of the present invention”, used interchangeably in this application.

[0066] The terms “small activating RNA” or “saRNA” in the context mean a single stranded or double stranded RNA typically with less than 50 nucleotides that upregulates or has a positive effect on the gene expression of a specific gene. Said gene is called the target gene of said saRNA. For example, C/EBPα gene is the target gene of C/EBPα-saRNA of the present invention.

saRNA Design

[0067] C/EBPα-saRNA targets a C/EBPα transcript. In one embodiment, it is designed to be complementary to a target antisense RNA transcript of C/EBPα gene, and it may exert its effect on C/EBPα gene expression and/or function by down-regulating the target antisense RNA transcript.

[0068] The term “complementary to” in the context means being able to hybridize with the target antisense RNA transcript under stringent conditions.

[0069] The term “sense” when used to describe a nucleic acid sequence in the context of the present invention means that the sequence has identity to a sequence on the coding strand of a gene. The term “antisense” when used to describe a nucleic acid sequence in the context of the present invention means that the sequence is complementary to a sequence on the coding strand of a gene.

[0070] The target antisense RNA transcript may be transcribed from a locus up to 100, 80, 60, 40, 20 or 10 kb upstream of C/EBPα gene's transcription start site (TSS), or from a locus up to 100, 80, 60, 40, 20 or 10 kb downstream of C/EBPα gene's transcription stop site. In one embodiment, the target antisense RNA transcript is transcribed from a locus up to 1 kb upstream of C/EBPα gene's transcription start site or from a locus up to 1 kb downstream of C/EBPα gene's transcription stop site. In another embodiment, the target antisense RNA transcript is transcribed from a locus up to 500, 250 or 100 nucleotides upstream of C/EBPα gene's transcription start site or from a locus up to 500, 250 or 100 nucleotides downstream of C/EBPα gene's transcription stop site. Preferably the locus is no more than 500 nucleotides upstream or downstream from C/EBPα gene's transcription start site.

[0071] The term “is transcribed from [a particular locus]” in the context of the target antisense RNA transcript of the invention means “the transcription start site of the target RNA transcript is found [at the particular locus]”. In one embodiment, both of the transcription start site and the transcription stop site of the target antisense RNA transcript are, separately, located either up to 100 kb upstream of C/EBPα gene's transcription start site or up to 100 kb downstream of C/EBPα gene's transcription stop site.

[0072] The target antisense RNA transcript is complementary to the coding strand of the genomic sequence of C/EBPα gene, and any reference herein to “genomic sequence” is shorthand for “coding strand of the genomic sequence”.

[0073] The “coding strand” of a gene is the strand which contains the coding sequence for the gene's mRNA. The “template strand” of a gene is the strand which does not contain the coding sequence for the gene's mRNA.

[0074] Thus, the target antisense RNA transcript may comprise a sequence which is complementary to a genomic sequence located between 100, 80, 60, 40, 20 or 10 kb upstream of C/EBPα gene's transcription start site and 100, 80, 60, 40, 20 or 10 kb downstream of C/EBPα gene's transcription stop site. In one embodiment, the target antisense RNA transcript comprises a sequence which is complementary to a genomic sequence located between 1 kb upstream of C/EBPα gene's transcription start site and 1 kb downstream of C/EBPα gene's transcription stop site. In another embodiment, the target antisense RNA transcript comprises a sequence which is complementary to a genomic sequence located between 500, 250 or 100 nucleotides upstream of C/EBPα gene's transcription start site and ending 500, 250 or 100 nucleotides downstream of C/EBPα gene's transcription stop site. The target antisense RNA transcript may comprise a sequence which is complementary to a genomic sequence which includes the coding region of C/EBPα gene. Most preferably, the target antisense RNA transcript comprises a sequence which is complementary to a genomic sequence in C/EBPα gene's promoter region. Thus, the target antisense RNA transcript preferably comprises a sequence which is complementary to the promoter region of C/EBPα gene.

[0075] Genes may possess a plurality of promoter regions, in which case the target antisense RNA transcript may overlap with one, two or more of the promoter regions. Online database of annotated gene loci may be used to identify the promoter regions of genes.

[0076] The region of overlap, i.e., complementary region, between the target antisense RNA transcript and the promoter region of C/EBPα gene may be partial and may be as short as a single nucleotide in length, although it is preferably at least 15 nucleotides in length, more preferably at least 25 nucleotides in length, more preferably at least 50 nucleotides in length, more preferably at least 75 nucleotides in length, most preferably at least 100 nucleotides in length. Each of the following specific arrangements is intended to fall within the scope of the term “overlap”:

[0077] a) The target antisense RNA transcript and C/EBPα gene's promoter region are identical in length and they overlap (i.e. they are complementary over their entire lengths).

[0078] b) The target antisense RNA transcript is shorter than C/EBPα gene's promoter region and overlaps over its entire length with C/EBPα gene's promoter region (i.e. it is complementary over its entire length to a sequence within C/EBPα gene's promoter region).

[0079] c) The target antisense RNA transcript is longer than C/EBPα gene's promoter region and C/EBPα gene's promoter region is overlapped fully by it (i.e. C/EBPα gene's promoter region is complementary over its entire length to a sequence within the target antisense RNA transcript).

[0080] d) The target antisense RNA transcript and C/EBPα gene's promoter region are of the same or different lengths and the region of overlap is shorter than both the length of the target antisense RNA transcript and the length of C/EBPα gene's promoter region.

[0081] The above definition of “overlap” applies mutatis mutandis to the description of other overlapping sequences throughout the description. Clearly, if a target antisense RNA transcript is described as overlapping with a region of C/EBPα gene other than the promoter region then the sequence of the target antisense RNA transcript is complementary to a sequence within that region rather than within the promoter region of C/EBPα gene.

[0082] In one embodiment, the target antisense RNA transcript comprises a sequence which is complementary to a genomic sequence which comprises C/EBPα gene's transcription start site. In other words, the target antisense RNA transcript comprises a sequence which overlaps with C/EBPα gene's transcription start site.

[0083] In one embodiment, the target antisense RNA transcript is at least 1 kb, preferably at least 2, 3, 4, 5, 6, 7, 8, 9 or 10, e.g., 20, 25, 30, 35 or 40 kb long.

[0084] In one embodiment, the target antisense RNA transcript comprises a sequence which is at least 75%, preferably at least 85%, more preferably at least 90%, still more preferably at least 95% complementary along its full length to a sequence on the coding strand of C/EBPα gene.

[0085] The present invention provides saRNA targeting the target antisense RNA transcript and may effectively and specifically down-regulate such target antisense RNA transcripts. This can be achieved by saRNA having a high degree of complementarity to a sequence within the target antisense RNA transcript. The saRNA will have no more than 5, preferably no more than 4 or 3, more preferably no more than 2, still more preferably no more than 1, most preferably no mismatches with the sequence within the target antisense RNA transcript.

[0086] In one embodiment, the saRNA of the present invention comprises a sequence of at least 13 nucleotides which has at least 95, 98, 99 or 100% complementarity to a region of the target antisense RNA transcript. Preferably, said sequence which has at least 95, 98, 99 or 100% complementarity to a region of the target antisense RNA transcript is at least 15, 16, 17, 18 or 19 nucleotides in length, preferably 18-22 or 19 to 21, most preferably exactly 19. The saRNA of the present invention may also comprise a 3′ tail, which may be UU or UUU.

[0087] In one embodiment, the saRNA of the present invention may have two strands that form a duplex, one strand being a guide strand. It may have siRNA-like complementarity to a region of the target transcript; that is, 100% complementarity between nucleotides 2-6 from the 5′ end of the guide strand in the saRNA duplex and a region of the target antisense RNA transcript. Other nucleotides of the saRNA may, in addition, have at least 70, 80, 90, 95, 99 or 100% complementarity to a region of the target antisense RNA transcript. For example, nucleotides 7 (counted from the 5′ end) until the 3′ end of the saRNA may have least 70, 80, 90, 95, 99 or 100% complementarity to a region of the target antisense RNA transcript.

[0088] The terms “small interfering RNA” or “siRNA” in the context mean a double-stranded RNA typically 20-25 nucleotides long involved in the RNA interference (RNAi) pathway and interfering with or inhibiting the expression of a specific gene. Said gene is the target gene of said siRNA. For example, siRNA that interferes the expression of C/EBPβ gene is called “C/EBPβ-siRNA” and C/EBPβ gene is the target gene. siRNA that interferes with the expression of C/EBPα is called “C/EBPα-siRNA” and C/EBPα is the target gene. siRNA is usually about 21 nucleotides long, with 3′ overhangs (2 nucleotides) at each end of the two strands.

[0089] siRNA inhibits target gene expression by binding to and promoting the cleavage of one or more RNA transcripts of said gene at specific sequences. Typically in RNAi the RNA transcripts are mRNA, so cleavage of mRNA results in the down-regulation of gene expression. In the present invention, not willing to be bound with any theory, one of the possible mechanisms is that C/EBPα-saRNA may modulate C/EBPα gene expression by cleavage of the target antisense RNA transcript.

[0090] The skilled person will appreciate that it is convenient to define the saRNA of the present invention by reference to the target antisense RNA transcript, regardless of the mechanism by which the saRNA modulates C/EBPα gene expression. However, the saRNA of the present invention may alternatively be defined by reference to C/EBPα gene. The target antisense RNA transcript is complementary to a genomic region on the coding strand of C/EBPα gene, and the saRNA of the present invention is in turn complementary to a region of the target antisense RNA transcript, so the saRNA of the present invention may be defined as having sequence identity to a region on the coding strand of C/EBPα gene. All of the features discussed herein with respect to the definition of the saRNA of the present invention by reference to the target antisense RNA transcript apply mutatis mutandis to the definition of the saRNA of the present invention by reference to C/EBPα gene so any discussion of complementarity to the target antisense RNA transcript should be understood to include identity to the genomic sequence of C/EBPα gene. Thus, the saRNA of the present invention preferably has a high percent identity, e.g. at least 75, 80, 85, 90, 95, 98 or 99, preferably 100% identity, to a genomic sequence on C/EBPα gene. It is preferable that the genomic sequence is up to 500 nucleotides upstream or downstream of C/EBPα gene's transcription start site. Most preferably, it is within C/EBPα gene's promoter region. Thus, the saRNA preferably has sequence identity to a sequence that is within the promoter region of C/EBPα gene.

[0091] The saRNA of the present invention may be single or, preferably, double stranded. Double stranded molecules comprise a first strand and a second strand. If double stranded, preferably each strand of the duplex is at least 14, more preferably at least 18, e.g. 19, 20, 21 or 22 nucleotides in length. Preferably the duplex is hybridized over a length of at least 12, more preferably at least 15, more preferably 17, still more preferably at least 19 nucleotides. Each strand may be exactly 19 nucleotides in length. Preferably, the length of the saRNA is less than 30 nucleotides since oligonucleotide duplex exceeding this length may have an increased risk of inducing the interferon response. The strands forming the saRNA duplex may be of equal or unequal lengths.

[0092] The saRNA of the present invention may include a short 3′ or 5′ sequence which is not complementary to the target antisense RNA transcript. In one embodiment, such a sequence is 3′. Said sequence may be 1-5 nucleotides in length, preferably 2 or 3. Said sequence preferably comprises uracil, so preferably it is a 3′ stretch of 2 or 3 uracils. This non-complementary sequence may be referred to as “tail”. If a 3′ tail is present, the strand may be longer, e.g., 19 nucleotides plus a 3′ tail, which is preferably UU or UUU. The saRNA of the present invention may further comprise Dicer or Drosha substrate sequences.

[0093] The saRNA of the present invention may contain a flanking sequence. The flanking sequence may be inserted in the 3′ end or 5′ end of the saRNA of the present invention. In one embodiment, the flanking sequence is the sequence of a miRNA, rendering the saRNA to have miRNA configuration and may be processed with Drosha and Dicer. In a non-limiting example, the saRNA of the present invention has two strands and is cloned into a miR-30 backbone flanking sequence.

[0094] The saRNA of the present invention may comprise a restriction enzyme substrate or recognition sequence. The restriction enzyme recognition sequence may be at the 3′ end or 5′ end of the saRNA of the present invention. Non-limiting examples of restriction enzymes include NotI and AscI.

[0095] In one embodiment, the saRNA of the present invention consist of the two strands stably base-paired together with a number of unpaired nucleotides at the 3′ end of each strand forming 3′ overhangs. The number of unpaired nucleotides forming the 3′ overhang of each strand is preferably in the range of 1 to 5 nucleotides, more preferably 1 to 3 nucleotides and most preferably 2 nucleotides. The 3′ overhang may be formed on the 3′ tail mentioned above, so the 3′ tail may be the 3′ overhang.

[0096] Thus, the saRNA of the present invention preferably consists of (i) a sequence having at least 95% complementarity to a region of the target antisense RNA transcript; and (ii) a 3′ tail of 1-5 nucleotides, which preferably comprises uracil residues. The saRNA of the present invention preferably has complementarity to a region of the target antisense RNA transcript over its whole length, except for the 3′ tail, if present. As mentioned above, instead of “complementary to the target antisense RNA transcript” the saRNA of the present invention may also be defined as having “identity” to the coding strand of the C/EBPα gene.

[0097] The design of saRNA is also disclosed in copending PCT Application No. PCT/GB2012/051422, copending US Pat. Pub. No. 2013/0164846 (saRNA algorithm), U.S. Pat. Nos. 8,324,181 and 7,709,566 to Corey et al., US Pat. Pub. No. 2010/0210707 to Li et al., and Voutila et al., Mol Ther Nucleic Acids, vol. 1, e35 (2012), the contents of each of which are incorporated herein by reference in their entirety.

[0098] As described herein, the sequence for C/EBPα gene is used to design C/EBPα-saRNA. The sequence of a target C/EBPα transcript may be determined from the sequence of C/EBPα gene for designing C/EBPα-saRNA. However, the existence of such a C/EBPα transcript does not need to be determined. Preferred sequences of suitable C/EBPα-saRNA of the present invention are provided in Table 1. Thus, provided is C/EBPα-saRNA having a first strand comprising a sequence selected from SEQ ID Nos: 2, 4, 6, 8, 10, and 12. Optionally, the C/EBPα-saRNA may comprise a 3′ tail at the 3′ end of these sequences.

[0099] Single stranded C/EBPα-saRNA only consists of a first strand, whereas double stranded C/EBPα-saRNA also has a second strand. The double stranded C/EBPα-saRNA may thus have a second strand comprising a sequence selected from SEQ ID Nos: 1, 3, 5, 7, 9, and 11.

[0100] A double stranded C/EBPα-saRNA having a first strand of SEQ ID No: 2 and a second strand of SEQ ID No: 1 is preferred.

TABLE 1
saRNA sequences

| | | | SEQ | | SEQ |
|---|---|---|---|---|---|
| | | | ID | | ID |
| | ID | Target (Sense) | NO | Anti-sense (Guide) | NO |
| Human C/EBPα | AW1 | CGGUCAUUGUCACUGGUCA | 1 | UGACCAGUGACAAUGACCG | 2 |
| | AW2 | AGCUGAAAGGAUUCAUCCU | 3 | AGGAUGAAUCCUUCCAGCU | 4 |
| | NR1 | ACAUAGUCCCAGUGAUUAA | 5 | UUAAUCACUGGGACUAUGU | 6 |
| | NR2 | GAAUAAGACUUUGUCCAAU | 7 | AUUGGACAAAGUCUUAUUC | 8 |
| | PR1 | GCGCGGAUUCUCUUUCAAA | 9 | UUUGAAAGAGAAUCCGCGC | 10 |
| | PR2 | CCAGGAACUCGUCGUUGAA | 11 | UUCAACGACGAGUUCCUGG | 12 |

[0101] Bifunction or dual-functional oligonucleotides are also designed to up-regulate C/EBPα gene expression and down-regulate C/EBPβ gene expression. One strand of the dual-functional oligonucleotide activates C/EBPα gene expression and the other inhibits C/EBPβ gene expression. Preferred dual-functional oligonucleotide sequences are shown in Table 2A. Each strand might further comprise a Dicer substrate sequence as shown in Table 2B.

TABLE 2A
Bifunction oligonucleotide sequences

| | 19mer 1 | 19mer 2 |
|---|---|---|
| ID | (Target C/EBPβ (NM_005194)) | (Target C/EBPα-AS (NM_004364)) |
| sa- | AGAAGUUGGCCACUUCCAU | AUGGAGUCGGCCGACUUCU |
| CEBPA_si- | (SEQ ID NO. 13) | (SEQ ID NO. 14) |
| CEBPB-1 | | |
| sa- | AAGAGGUCGGAGAGGAAGU | AGUUCCUGGCCGACCUGUU |
| CEBPA_si- | (SEQ ID NO. 15) | (SEQ ID NO. 16) |
| CEBPB-2 | | |
| sa- | UUGUACUCGUCGCUGUGCU | AGAACAGCAACGAGUACCG |
| CEBPA_si- | (SEQ ID NO. 17) | (SEQ ID NO. 18) |
| CEBPB-3 | | |
| sa- | UACUCGUCGCUGUGCUUGU | ACAAGAACAGCAACGAGUA |
| CEBPA_si- | (SEQ ID NO. 19) | (SEQ ID NO. 20) |
| CEBPB-4 | | |

TABLE 2B
Dice substrate sequences ofbifunction oligonucleotide sequences

| | DicerSubstrateStrand1 (RNAs in upper | DicerSubstrateStrand2 (RNAs in upper |
|---|---|---|
| ID | case; DNAs in underlined lower case) | case; DNAs in underlined lower case) |
| sa- | AGAAGUUGGCCACUUCCAUGGGGga | tcCCCCAUGGAGUCGGCCGACUUCUAC |
| CEBPA_si- | (SEQ ID NO. 21) | (SEQ ID NO. 22) |
| CEBPB-1 | | |
| sa- | AAGAGGUCGGAGAGGAAGUCGUCgt | acGACGAGUUCCUGGCCGACCUGUUCC |
| CEBPA_si- | (SEQ ID NO. 23) | (SEQ ID NO. 24) |
| CEBPB-2 | | |
| sa- | UUGUACUCGUCGCUGUGCUUGUCca | tgGACAAGAACAGCAACGAGUACCGGG |
| CEBPA_si- | (SEQ ID NO. 25) | (SEQ ID NO. 26) |
| CEBPB-3 | | |
| sa- | UACUCGUCGCUGUGCUUGUCCACcg | cgGUGGACAAGAACAGCAACGAGUACC |
| CEBPA_si- | (SEQ ID NO. 27) | (SEQ ID NO. 28) |
| CEBPB-4 | | |

[0102] The saRNA of the present invention may be produced by any suitable method, for example synthetically or by expression in cells using standard molecular biology techniques which are well-known to a person of ordinary skill in the art. For example, the saRNA of the present invention may be chemically synthesized or recombinantly produced using methods known in the art.

Chemical Modifications of saRNA

[0103] Herein, in saRNA, the terms “modification” or, as appropriate, “modified” refer to structural and/or chemical modifications with respect to A, G, U or C ribonucleotides. Nucleotides in the saRNA molecules of the present invention may comprise non-standard nucleotides, such as non-naturally occurring nucleotides or chemically synthesized nucleotides or deoxynucleotides. The saRNA of the present invention may include any useful modification, such as to the sugar, the nucleobase, or the internucleoside linkage (e.g. to a linking phosphate/to a phosphodiester linkage/to the phosphodiester backbone). One or more atoms of a pyrimidine nucleobase may be replaced or substituted with optionally substituted amino, optionally substituted thiol, optionally substituted alkyl (e.g., methyl or ethyl), or halo (e.g., chloro or fluoro). In certain embodiments, modifications (e.g., one or more modifications) are present in each of the sugar and the internucleoside linkage. Modifications according to the present invention may be modifications of ribonucleic acids (RNAs) to deoxyribonucleic acids (DNAs), threose nucleic acids (TNAs), glycol nucleic acids (GNAs), peptide nucleic acids (PNAs), locked nucleic acids (LNAs) or hybrids thereof. In a non-limiting example, the 2′-OH of U is substituted with —OMe.

[0104] The saRNA of the present invention can include a combination of modifications to the sugar, the nucleobase, and/or the internucleoside linkage. These combinations can include any one or more modifications described herein or in International Application Publication WO2013/052523 filed Oct. 3, 2012, in particular Formulas (Ia)-(Ia-5), (Ib)-(If), (IIa)-(IIp), (IIb-1), (IIb-2), (IIc-1)-(IIc-2), (IIn-1), (IIn-2), (IVa)-(IVl), and (IXa)-(IXr)), the contents of which are incorporated herein by reference in their entirety.

[0105] The saRNA of the present invention may or may not be uniformly modified along the entire length of the molecule. For example, one or more or all types of nucleotide (e.g., purine or pyrimidine, or any one or more or all of A, G, U, C) may or may not be uniformly modified in the saRNA of the invention. In some embodiments, all nucleotides X in a saRNA of the invention are modified, wherein X may be any one of nucleotides A, G, U, C, or any one of the combinations A+G, A+U, A+C, G+U, G+C, U+C, A+G+U, A+G+C, G+U+C or A+G+C.

[0106] Different sugar modifications, nucleotide modifications, and/or internucleoside linkages (e.g., backbone structures) may exist at various positions in a saRNA. One of ordinary skill in the art will appreciate that the nucleotide analogs or other modification(s) may be located at any position(s) of a saRNA such that the function of saRNA is not substantially decreased. The saRNA of the present invention may contain from about 1% to about 100% modified nucleotides (either in relation to overall nucleotide content, or in relation to one or more types of nucleotide, i.e. any one or more of A, G, U or C) or any intervening percentage (e.g., from 1% to 20%, from 1% to 25%, from 1% to 50%, from 1% to 60%, from 1% to 70%, from 1% to 80%, from 1% to 90%, from 1% to 95%, from 10% to 20%, from 10% to 25%, from 10% to 50%, from 10% to 60%, from 10% to 70%, from 10% to 80%, from 10% to 90%, from 10% to 95%, from 10% to 100%, from 20% to 25%, from 20% to 50%, from 20% to 60%, from 20% to 70%, from 20% to 80%, from 20% to 90%, from 20% to 95%, from 20% to 100%, from 50% to 60%, from 50% to 70%, from 50% to 80%, from 50% to 90%, from 50% to 95%, from 50% to 100%, from 70% to 80%, from 70% to 90%, from 70% to 95%, from 70% to 100%, from 80% to 90%, from 80% to 95%, from 80% to 100%, from 90% to 95%, from 90% to 100%, and from 95% to 100%).

[0107] In some embodiments, the saRNA of the present invention may be modified to be a spherical nucleic acid (SNA) or a circular nucleic acid. The terminals of the saRNA of the present invention may be linked by chemical reagents or enzymes, producing spherical saRNA that has no free ends. Spherical saRNA is expected to be more stable than its linear counterpart and to be resistant to digestion with RNase R exonuclease. Spherical saRNA may further comprise other structural and/or chemical modifications with respect to A, G, U or C ribonucleotides.

[0108] In some embodiments, the saRNA of the present invention may comprise inverted abasic modifications. In some embodiments, the inverted abasic modification may be at 5′ terminus.

saRNA Conjugates and Combinations

[0109] Conjugation may result in increased stability and/or half life and may be particularly useful in targeting the saRNA of the present invention to specific sites in the cell, tissue or organism. The saRNA of the present invention can be designed to be conjugated to other polynucleotides, dyes, intercalating agents (e.g. acridines), cross-linkers (e.g. psoralene, mitomycin C), porphyrins (TPPC4, texaphyrin, Sapphyrin), polycyclic aromatic hydrocarbons (e.g., phenazine, dihydrophenazine), artificial endonucleases (e.g. EDTA), alkylating agents, phosphate, amino, mercapto, PEG (e.g., PEG-40K), MPEG, [MPEG]₂, polyamino, alkyl, substituted alkyl, radiolabeled markers, enzymes, haptens (e.g. biotin), transport/absorption facilitators (e.g., aspirin, vitamin E, folic acid), synthetic ribonucleases, proteins, e.g., glycoproteins, or peptides, e.g., molecules having a specific affinity for a co-ligand, or antibodies e.g., an antibody, that binds to a specified cell type such as a cancer cell, endothelial cell, or bone cell, hormones and hormone receptors, non-peptidic species, such as lipids, lectins, carbohydrates, vitamins, cofactors, or a drug. Suitable conjugates for nucleic acid molecules are disclosed in International Publication WO 2013/090648 filed Dec. 14, 2012, the contents of which are incorporated herein by reference in their entirety.

[0110] According to the present invention, C/EBPα-saRNA may be administered with, or further encode one or more of RNAi agents, small interfering RNAs (siRNAs), small hairpin RNAs (shRNAs), long non-coding RNAs (lncRNAs), enhancer RNAs, enhancer-derived RNAs or enhancer-driven RNAs (eRNAs), microRNAs (miRNAs), miRNA binding sites, antisense RNAs, ribozymes, catalytic DNA, tRNA, RNAs that induce triple helix formation, aptamers or vectors, and the like to achieve different functions. The one or more RNAi agents, small interfering RNAs (siRNAs), small hairpin RNAs (shRNAs), long non-coding RNAs (lncRNA), microRNAs (miRNAs), miRNA binding sites, antisense RNAs, ribozymes, catalytic DNA, tRNA, RNAs that induce triple helix formation, aptamers or vectors may comprise at least one modification or substitution. In some embodiments, the modification is selected from a chemical substitution of the nucleic acid at a sugar position, a chemical substitution at a phosphate position and a chemical substitution at a base position. In other embodiments, the chemical modification is selected from incorporation of a modified nucleotide; 3′ capping; conjugation to a high molecular weight, non-immunogenic compound; conjugation to a lipophilic compound; and incorporation of phosphorothioate into the phosphate backbone. In a preferred embodiment, the high molecular weight, non-immunogenic compound is polyalkylene glycol, and more preferably is polyethylene glycol (PEG).

[0111] In one embodiment, C/EBPα-saRNA may be attached to a transgene so it can be co-expressed from an RNA polymerase II promoter. In a non-limiting example, C/EBPα-saRNA is attached to green fluorescent protein gene (GFP).

[0112] In one embodiment, C/EBPα-saRNA may be attached to a DNA or RNA aptamer, thereby producing C/EBPα-saRNA-aptamer conjugate. Aptamers are oligonucleotides or peptides with high selectivity, affinity and stability. They assume specific and stable three-dimensional shapes, thereby providing highly specific, tight binding to target molecules. An aptamer may be a nucleic acid species that has been engineered through repeated rounds of in vitro selection or equivalently, SELEX (systematic evolution of ligands by exponential enrichment) to bind to various molecular targets such as small molecules, proteins, nucleic acids, and even cells, tissues and organisms. Nucleic acid aptamers have specific binding affinity to molecules through interactions other than classic Watson-Crick base pairing. Nucleic acid aptamers, like peptides generated by phage display or monoclonal antibodies (mAbs), are capable of specifically binding to selected targets and, through binding, block their targets' ability to function. In some cases, aptamers may also be peptide aptamers. For any specific molecular target, nucleic acid aptamers can be identified from combinatorial libraries of nucleic acids, e.g. by SELEX. Peptide aptamers may be identified using a yeast two hybrid system. A skilled person is therefore able to design suitable aptamers for delivering the saRNAs or cells of the present invention to target cells such as liver cells. DNA aptamers, RNA aptamers and peptide aptamers are contemplated. Administration of saRNA of the present invention to the liver using liver-specific aptamers is particularly preferred.

[0113] As used herein, a typical nucleic acid aptamer is approximately 10-15 kDa in size (20-45 nucleotides), binds its target with at least nanomolar affinity, and discriminates against closely related targets. Nucleic acid aptamers may be ribonucleic acid, deoxyribonucleic acid, or mixed ribonucleic acid and deoxyribonucleic acid. Aptamers may be single stranded ribonucleic acid, deoxyribonucleic acid or mixed ribonucleic acid and deoxyribonucleic acid. Aptamers may comprise at least one chemical modification.

[0114] A suitable nucleotide length for an aptamer ranges from about 15 to about 100 nucleotides (nt), and in various other preferred embodiments, 15-30 nt, 20-25 nt, 30-100 nt, 30-60 nt, 25-70 nt, 25-60 nt, 40-60 nt, 25-40 nt, 30-40 nt, any of 22, 23, 24, 25, 26, 27, 28, 29, 30, 31, 32, 33, 34, 35, 36, 37, 38, 39 or 40 nt or 40-70 nt in length. However, the sequence can be designed with sufficient flexibility such that it can accommodate interactions of aptamers with two targets at the distances described herein. Aptamers may be further modified to provide protection from nuclease and other enzymatic activities. The aptamer sequence can be modified by any suitable methods known in the art.

[0115] The C/EBPα-saRNA-aptamer conjugate may be formed using any known method for linking two moieties, such as direct chemical bond formation, linkage via a linker such as streptavidin and so on.

[0116] In one embodiment, C/EBPα-saRNA may be attached to an antibody. Methods of generating antibodies against a target cell surface receptor are well known. The saRNA molecules of the invention may be attached to such antibodies with known methods, for example using RNA carrier proteins. The resulting complex may then be administered to a subject and taken up by the target cells via receptor-mediated endocytosis.

[0117] In one embodiment, C/EBPα-saRNA may be conjugated with lipid moieties such as a cholesterol moiety (Letsinger et al., Proc. Natl. Acid. Sci. USA, 1989, 86: 6553-6556), cholic acid (Manoharan et al., Biorg. Med. Chem. Let., 1994, 4:1053-1060), a thioether, e.g., beryl-5-tritylthiol (Manoharan et al., Ann. N.Y. Acad. Sci., 1992, 660:306-309; Manoharan et al., Biorg. Med. Chem. Let., 1993, 3:2765-2770), a thiocholesterol (Oberhauser et al., Nucl. Acids Res., 1992, 20:533-538), an aliphatic chain, e.g., dodecandiol or undecyl residues (Saison-Behmoaras et al., EMBO J, 1991, 10:1111-1118; Kabanov et al., FEBS Lett., 1990, 259:327-330; Svinarchuk et al., Biochimie, 1993, 75:49-54), a phospholipid, e.g., di-hexadecyl-rac-glycerol or triethyl-ammonium 1,2-di-O-hexadecyl-rac-glycero-3-Hphosphonate (Manoharan et al., Tetrahedron Lett., 1995, 36:3651-3654; Shea et al., Nucl. Acids Res., 1990, 18:3777-3783), a polyamine or a polyethylene glycol chain (Manoharan et al., Nucleosides & Nucleotides, 1995, 14:969-973), or adamantane acetic acid (Manoharan et al., Tetrahedron Lett., 1995, 36:3651-3654), a palmityl moiety (Mishra et al., Biochim. Biophys. Acta, 1995, 1264:229-237), or an octadecylamine or hexylamino-carbonyloxycholesterol moiety (Crooke et al., J. Pharmacol. Exp. Ther., 1996, 277:923-937), the content of each of which is herein incorporated by reference in its entirety.

[0118] In one embodiment, the saRNA of the present invention is conjugated with a ligand disclosed in US 20130184328 to Manoharan et al., the contents of which are incorporated herein by reference in their entirety. The conjugate has a formula of Ligand-[linker]ₒₚₜᵢₒₙₐₗ-[tether]ₒₚₜᵢₒₙₐₗ-oligonucleotide agent. The oligonucleotide agent may comprise a subunit having formulae (I) disclosed by US 20130184328 to Manoharan et al., the contents of which are incorporated herein by reference in their entirety.

[0119] Representative U.S. patents that teach the preparation of such nucleic acid/lipid conjugates include, but are not limited to, U.S. Pat. Nos. 4,828,979; 4,948,882; 5,218,105; 5,525,465; 5,541,313; 5,545,730; 5,552,538; 5,578,717, 5,580,731; 5,591,584; 5,109,124; 5,118,802; 5,138,045; 5,414,077; 5,486,603; 5,512,439; 5,578,718; 5,608,046; 4,587,044; 4,605,735; 4,667,025; 4,762,779; 4,789,737; 4,824,941; 4,835,263; 4,876,335; 4,904,582; 4,958,013; 5,082,830; 5,112,963; 5,214,136; 5,082,830; 5,112,963; 5,214,136; 5,245,022; 5,254,469; 5,258,506; 5,262,536; 5,272,250; 5,292,873; 5,317,098; 5,371,241, 5,391,723; 5,416,203, 5,451,463; 5,510,475; 5,512,667; 5,514,785; 5,565,552; 5,567,810; 5,574,142; 5,585,481; 5,587,371; 5,595,726; 5,597,696; 5,599,923; 5,599,928 and 5,688,941, the content of each of which is herein incorporated by reference in its entirety.

[0120] The saRNA of the present invention may be provided in combination with other active ingredients known to have an effect in the particular method being considered. The other active ingredients may be administered simultaneously, separately, or sequentially with the saRNA of the present invention. In one embodiment, C/EBPα-saRNA is administered with saRNA modulating a different target gene. Non-limiting examples include saRNA that modulates albumin, insulin or HNF4A genes. Modulating any gene may be achieved using a single saRNA or a combination of two or more different saRNAs. Non-limiting examples of saRNA that can be administered with C/EBPα-saRNA of the present invention include saRNA modulating albumin or HNF4A disclosed in International Publication WO 2012/175958 filed Jun. 20, 2012, saRNA modulating insulin disclosed in International Publications WO 2012/046084 and WO 2012/046085 both filed Oct. 10, 2011, saRNA modulating human progesterone receptor, human major vault protein (hMVP), E-cadherin gene, p53 gene, or PTEN gene disclosed in U.S. Pat. No. 7,709,456 filed Nov. 13, 2006 and US Pat. Publication US 2010/0273863 filed Apr. 23, 2010, and saRNAs targeting p21 gene disclosed in International Publication WO 2006/113246 filed Apr. 11, 2006, the contents of each of which are incorporated herein by reference in their entirety.

[0121] In one embodiment, C/EBPα-saRNA is administered with a small interfering RNA or siRNA that inhibits the expression of C/EBPβ gene, i.e., C/EBPβ-siRNA. Preferred sequences of suitable siRNAs of the invention are provided in Table 3.

TABLE 3
siRNA sequences

| ID | C/EBPβ-si-1 | C/EBPβ-si-2 |
|---|---|---|
| Target | Ctgagtaatcgcttaaaga | gaaactttagcgagtcaga |
| | (SEQ ID NO: 253) | (SEQ ID NO: 254) |
| Efficacy | 0.7 | 0.52 |
| Location | 1892 | 239 |
| Sense (passenger) | CUGAGUAAUCGCUUAAAGAUU | GAAACUUUAGCGAGUCAGAUU |
| | (SEQ ID NO. 29) | (SEQ ID NO. 31) |
| Antisense (guide) | UCUUUAAGCGAUUACUCAGUU | UCUGACUCGCUAAAGUUUCUU |
| | (SEQ ID NO. 30) | (SEQ ID NO. 32) |

[0122] In one embodiment, C/EBPα-saRNA is administered with one or more drugs that regulate metabolics, particularly liver function. In a non-limiting example, C/EBPα-saRNA of the present invention is administered with drugs that decrease low density lipoprotein (LDL) cholesterol levels, such as statin, simvastatin, atorvastatin, rosuvastatin, ezetimibe, niacin, PCSK9 inhibitors, CETP inhibitors, clofibrate, fenofibric, tocotrienols, phytosterols, bile acid sequestrants, probucol, or a combination thereof. C/EBPα-saRNA may also be administered with vanadium biguanide complexes disclosed in U.S. Pat. No. 6,287,586 to Orvig et al. In another example, C/EBPα-saRNA may be administered with a composition disclosed in WO 201102838 to Rhodes, the contents of which are incorporated by reference in their entirety, to lower serum cholesterol. The composition comprises an antigen binding protein that selectively binds to and inhibits a PCSK9 protein; and an RNA effector agent which inhibits the expression of a PCSK9 gene in a cell. In yet another example, C/EBPα-saRNA may be administered with an ABC1 polypeptide having ABC1 biological activity, or a nucleic acid encoding an ABC1 polypeptide having ABC1 activity to modulate cholesterol levels as described in EP1854880 to Brooks-Wilson et al., the contents of which are incorporated herein by reference in their entirety.

[0123] In another embodiment, C/EBPα-saRNA of the present invention is administered with drugs that increase insulin sensitivity or treat type II diabetes mellitus, such as metformin, sulfonylurea, nonsulfonylurea secretagogues, a glucosidase inhibitors, thiazolidinediones, pioglitazone, rosiglitazone, glucagon-like peptide-1 analog, and dipeptidyl peptidase-4 inhibitors or a combination thereof. Other hepato-protective agents that may be administered in combination with the saRNA of the present invention are disclosed in Adams et al., Postgraduate Medical Journal, vol. 82, 315-322 (2006), the contents of which are incorporated herein by reference in their entirety.

### Gankyrin and FXR Protein

[0124] The development of hepatocellular carcinoma (HCC) is a multistep process which involves progressive changes of gene expression leading to liver hyperproliferation and to liver cancer. During carcinogenesis of liver cancer, tumor suppressor proteins Rb, p53, hepatocyte nuclear factor 4α (HNF4α), and C/EBP-α are neutralized. The elimination of these proteins is mediated by a small subunit of 26S proteasome, gankyrin, which is activated by cancer. Wang et al. discloses that gankyrin interacts with S193-ph isoform of C/EBPα and targets it for ubiquitinproteasome system (UPS)-mediated degradation. Gankyrin level is elevated during the early stages of liver cancer development (Wang et al., J. Clin. Invest, vol. 120(7):2549-2562 (2010), the contents of which are incorporated herein by reference in their entireties). Inhibiting gankyrin, e.g., using siRNA of the gankyrin gene (also known as PSMD10 gene) and/or gankyrin inhibitors, may prevent and/or treat HCC.

[0125] Jiang et al. found that farnesoid X receptor (FXR), also known as bile acid receptor (BAR) or NR1H4, inhibits expression of gankyrin in quiescent livers by silencing the gankyrin promoter through HDAC1-C/EBPβ complexes (Jiang et al., Hepatology, vol. 57(3):1098-1106 (2013), the contents of which are incorporated herein by reference in their entireties). Deletion of FXR signaling in mice leads to de-repression of the gankyrin promoter and to spontaneous development of liver cancer at 12 months of age. Diethylnitrosoamine (DEN)-mediated liver cancer in wild-type mice also involves the reduction of FXR and activation of gankyrin. Examination of liver cancer in old mice and liver cancer in human patients revealed that FXR is reduced, while gankyrin is elevated during spontaneous development of liver cancer. Jiang et al. concluded that FXR prevents liver cancer by inhibiting the gankyrin promoter via C/EBPD-HDAC1 complexes leading to subsequent protection of tumor suppressor proteins from degradation. Stabilization and nuclear translocation of FXR inhibits gankyrin. Activating FXR, e.g., using FXR agonists or activators, or activator of NR1H4 gene, may prevent and/or treat HCC.

[0126] C/EBPα-saRNA of the present invention may be used in combination with one or more of therapeutic agents that down-regulate gankyrin or up-regulate FXR. The combination may have synergistic effect on preventing and/or treating HCC. In some embodiments, C/EBPα-saRNA of the present invention may be used in combination with gankyrin-siRNA. Double-stranded Gankyrin-siRNA may be produced using the method disclosed by Higashitsuji et al. in the ‘Inhibition of endogenous gene expression by RNAi’ section (Higashitsuji et al., Cancer Cell, vol. 8:75-87 (2005), the contents of which are incorporated herein by reference in their entireties). In some embodiments, C/EBPα-saRNA of the present invention may be used in combination with FXR agonists. Non-limiting examples of FXR agonists or activators include taurocholic acid, obeticholic acid (OCA), INT-767 (Intercept Pharmaceuticals), INT-777 (Intercept Pharmaceuticals), and any FXR agonist or activator disclosed in US Pat. App. No. 20140057886, U.S. Pat. Nos. 8,546,365, 7,932,244, US Pat. App. No. 20140100209, U.S. Pat. Nos. 8,445,472, 8,114,862, US Pat. App. No. 20140094443, U.S. Pat. Nos. 8,410,083, 8,796,249, US Pat. App. No. 20140024631, U.S. Pat. Nos. 8,377,916, 8,258,267, 7,786,102, 7,138,390, 7,994,352, 7,858,608, 7,812,011, US Pat. App. No. 20140148428, and US Pat. App. No. 20060252670 (the contents of each of which are incorporated herein by reference in their entirety).

### Formulation, Delivery, Administration, and Dosing

[0127] Pharmaceutical formulations may additionally comprise a pharmaceutically acceptable excipient, which, as used herein, includes, but is not limited to, any and all solvents, dispersion media, diluents, or other liquid vehicles, dispersion or suspension aids, surface active agents, isotonic agents, thickening or emulsifying agents, preservatives, and the like, as suited to the particular dosage form desired. Various excipients for formulating pharmaceutical compositions and techniques for preparing the composition are known in the art (see Remington: The Science and Practice of Pharmacy, 21^{st} Edition, A. R. Gennaro, Lippincott, Williams & Wilkins, Baltimore, MD, 2006; incorporated herein by reference in its entirety). The use of a conventional excipient medium may be contemplated within the scope of the present disclosure, except insofar as any conventional excipient medium may be incompatible with a substance or its derivatives, such as by producing any undesirable biological effect or otherwise interacting in a deleterious manner with any other component(s) of the pharmaceutical composition.

[0128] In some embodiments, compositions are administered to humans, human patients or subjects. For the purposes of the present disclosure, the phrase “active ingredient” generally refers to C/EBPα-saRNA to be delivered as described herein.

[0129] Although the descriptions of pharmaceutical compositions provided herein are principally directed to pharmaceutical compositions which are suitable for administration to humans, it will be understood by the skilled artisan that such compositions are generally suitable for administration to any other animal, e.g., to non-human animals, e.g. non-human mammals. Modification of pharmaceutical compositions suitable for administration to humans in order to render the compositions suitable for administration to various animals is well understood, and the ordinarily skilled veterinary pharmacologist can design and/or perform such modification with merely ordinary, if any, experimentation. Subjects to which administration of the pharmaceutical compositions is contemplated include, but are not limited to, humans and/or other primates; mammals, including commercially relevant mammals such as cattle, pigs, horses, sheep, cats, dogs, mice, and/or rats; and/or birds, including commercially relevant birds such as poultry, chickens, ducks, geese, and/or turkeys.

[0130] Formulations of the pharmaceutical compositions described herein may be prepared by any method known or hereafter developed in the art of pharmacology. In general, such preparatory methods include the step of bringing the active ingredient into association with an excipient and/or one or more other accessory ingredients, and then, if necessary and/or desirable, dividing, shaping and/or packaging the product into a desired single- or multi-dose unit.

[0131] A pharmaceutical composition in accordance with the invention may be prepared, packaged, and/or sold in bulk, as a single unit dose, and/or as a plurality of single unit doses. As used herein, a “unit dose” is discrete amount of the pharmaceutical composition comprising a predetermined amount of the active ingredient. The amount of the active ingredient is generally equal to the dosage of the active ingredient which would be administered to a subject and/or a convenient fraction of such a dosage such as, for example, one-half or one-third of such a dosage.

[0132] Relative amounts of the active ingredient, the pharmaceutically acceptable excipient, and/or any additional ingredients in a pharmaceutical composition in accordance with the invention will vary, depending upon the identity, size, and/or condition of the subject treated and further depending upon the route by which the composition is to be administered. By way of example, the composition may comprise between 0.1% and 100%, e.g., between 0.5 and 50%, between 1-30%, between 5-80%, at least 80% (w/w) active ingredient.

[0133] In some embodiments, the formulations described herein may contain at least one saRNA. As a non-limiting example, the formulations may contain 1, 2, 3, 4 or 5 saRNAs with different sequences. In one embodiment, the formulation contains at least three saRNAs with different sequences. In one embodiment, the formulation contains at least five saRNAs with different sequences.

[0134] The saRNA of the invention can be formulated using one or more excipients to: (1) increase stability; (2) increase cell transfection; (3) permit the sustained or delayed release (e.g., from a depot formulation of the saRNA); (4) alter the biodistribution (e.g., target the saRNA to specific tissues or cell types); (5) increase the translation of encoded protein in vivo; and/or (6) alter the release profile of encoded protein in vivo. In addition to traditional excipients such as any and all solvents, dispersion media, diluents, or other liquid vehicles, dispersion or suspension aids, surface active agents, isotonic agents, thickening or emulsifying agents, preservatives, excipients of the present invention can include, without limitation, lipidoids, liposomes, lipid nanoparticles, polymers, lipoplexes, core-shell nanoparticles, peptides, proteins, cells transfected with saRNA (e.g., for transplantation into a subject), hyaluronidase, nanoparticle mimics and combinations thereof. Accordingly, the formulations of the invention can include one or more excipients, each in an amount that together increases the stability of the saRNA and/or increases cell transfection by the saRNA. Further, the saRNA of the present invention may be formulated using self-assembled nucleic acid nanoparticles. Pharmaceutically acceptable carriers, excipients, and delivery agents for nucleic acids that may be used in the formulation with the saRNA of the present invention are disclosed in International Publication WO 2013/090648 filed Dec. 14, 2012, the contents of which are incorporated herein by reference in their entirety.

[0135] In one embodiment, the saRNA of the present invention comprises two single RNA strands that are 21 nucleotides in length each that are annealed to form a double stranded C/EBPα-saRNA as the active ingredient. The composition further comprises a salt buffer composed of 50 mM Tris-HCl, pH 8.0, 100 mM NaCl and 5 mM EDTA.

[0136] In another embodiment, the saRNA of the present invention may be delivered with dendrimers. Dendrimers are highly branched macromolecules. In a preferred embodiment, the saRNA of the present invention is complexed with structurally flexible poly(amidoamine) (PAMAM) dendrimers for targeted in vivo delivery. The complex is called C/EBPα-saRNA-dendrimers. Dendrimers have a high degree of molecular uniformity, narrow molecular weight distribution, specific size and shape characteristics, and a highly-functionalized terminal surface. The manufacturing process is a series of repetitive steps starting with a central initiator core. Each subsequent growth step represents a new generation of polymers with a larger molecular diameter and molecular weight, and more reactive surface sites than the preceding generation. PAMAM dendrimers are efficient nucleotide delivery systems that bear primary amine groups on their surface and also a tertiary amine group inside of the structure. The primary amine group participates in nucleotide binding and promotes their cellular uptake, while the buried tertiary amino groups act as a proton sponge in endosomes and enhance the release of nucleic acid into the cytoplasm. These dendrimers protect the saRNA carried by them from ribonuclease degradation and achieves substantial release of saRNA over an extended period of time via endocytosis for efficient gene targeting. The in vivo efficacy of these nanoparticles have previously been evaluated where biodistribution studies show that the dendrimers preferentially accumulate in peripheral blood mononuclear cells and live with no discernible toxicity (see Zhou et al., Molecular Ther. 2011 Vol. 19, 2228-2238, the contents of which are incorporated herein by reference in their entirety). PAMAM dendrimers may comprise a triethanolamine (TEA) core, a diaminobutane (DAB) core, a cystamine core, a diaminohexane (HEX) core, a diamonododecane (DODE) core, or an ethylenediamine (EDA) core. Preferably, PAMAM dendrimers comprise a TEA core or a DAB core.

### Lipidoids

[0137] The synthesis of lipidoids has been extensively described and formulations containing these compounds are particularly suited for delivery of oligonucleotides or nucleic acids (see Mahon et al., Bioconjug Chem. 2010 21:1448-1454; Schroeder et al., J Intern Med. 2010 267:9-21; Akinc et al., Nat Biotechnol. 2008 26:561-569; Love et al., Proc Natl Acad Sci USA. 2010 107:1864-1869; Siegwart et al., Proc Natl Acad Sci USA. 2011 108:12996-3001; all of which are incorporated herein in their entireties).

[0138] While these lipidoids have been used to effectively deliver double stranded small interfering RNA molecules in rodents and non-human primates (see Akinc et al., Nat Biotechnol. 2008 26:561-569; Frank-Kamenetsky et al., Proc Natl Acad Sci USA. 2008 105:11915-11920; Akinc et al., Mol Ther. 2009 17:872-879; Love et al., Proc Natl Acad Sci USA. 2010 107:1864-1869; Leuschner et al., Nat Biotechnol. 2011 29:1005-1010; all of which is incorporated herein in their entirety), the present disclosure describes their formulation and use in delivering saRNA. Complexes, micelles, liposomes or particles can be prepared containing these lipidoids and therefore, can result in an effective delivery of the saRNA following the injection of a lipidoid formulation via localized and/or systemic routes of administration. Lipidoid complexes of saRNA can be administered by various means including, but not limited to, intravenous, intramuscular, or subcutaneous routes.

[0139] In vivo delivery of nucleic acids may be affected by many parameters, including, but not limited to, the formulation composition, nature of particle PEGylation, degree of loading, oligonucleotide to lipid ratio, and biophysical parameters such as, but not limited to, particle size (Akinc et al., Mol Ther. 2009 17:872-879; the contents of which are herein incorporated by reference in its entirety). As an example, small changes in the anchor chain length of poly(ethylene glycol) (PEG) lipids may result in significant effects on in vivo efficacy. Formulations with the different lipidoids, including, but not limited to penta[3-(1-laurylaminopropionyl)]-triethylenetetramine hydrochloride (TETA-5LAP; aka 98N12-5, see Murugaiah et al., Analytical Biochemistry, 401:61 (2010); the contents of which are herein incorporated by reference in its entirety), C12-200 (including derivatives and variants), and MDT, can be tested for in vivo activity.

[0140] The lipidoid referred to herein as “98N12-5” is disclosed by Akinc et al., Mol Ther. 2009 17:872-879 and the contents of which is incorporated by reference in its entirety. (See FIG. 2)

[0141] The lipidoid referred to herein as “C12-200” is disclosed by Love et al., Proc Natl Acad Sci USA. 2010 107:1864-1869 (see FIG. 2) and Liu and Huang, Molecular Therapy. 2010 669-670 (see FIG. 2); the contents of both of which are herein incorporated by reference in their entirety. The lipidoid formulations can include particles comprising either 3 or 4 or more components in addition to the saRNA. As an example, formulations with certain lipidoids, include, but are not limited to, 98N12-5 and may contain 42% lipidoid, 48% cholesterol and 10% PEG (C14 alkyl chain length). As another example, formulations with certain lipidoids, include, but are not limited to, C12-200 and may contain 50% lipidoid, 10% disteroylphosphatidyl choline, 38.5% cholesterol, and 1.5% PEG-DMG.

[0142] In one embodiment, a saRNA formulated with a lipidoid for systemic intravenous administration can target the liver. For example, a final optimized intravenous formulation using saRNA and comprising a lipid molar composition of 42% 98N12-5, 48% cholesterol, and 10% PEG-lipid with a final weight ratio of about 7.5 to 1 total lipid to saRNA and a C14 alkyl chain length on the PEG lipid, with a mean particle size of roughly 50-60 nm, can result in the distribution of the formulation to be greater than 90% to the liver. (see, Akinc et al., Mol Ther. 2009 17:872-879; the contents of which are herein incorporated by reference in its entirety). In another example, an intravenous formulation using a C12-200 (see U.S. provisional application 61/175,770 and published international application WO2010129709, the contents of each of which is herein incorporated by reference in their entirety) lipidoid may have a molar ratio of 50/10/38.5/1.5 of C12-200/disteroylphosphatidyl choline/cholesterol/PEG-DMG, with a weight ratio of 7 to 1 total lipid to nucleic acid and a mean particle size of 80 nm may be effective to deliver saRNA (see, Love et al., Proc Natl Acad Sci USA. 2010 107:1864-1869, the contents of which are herein incorporated by reference in its entirety). In another embodiment, an MD1 lipidoid-containing formulation may be used to effectively deliver saRNA to hepatocytes in vivo. The characteristics of optimized lipidoid formulations for intramuscular or subcutaneous routes may vary significantly depending on the target cell type and the ability of formulations to diffuse through the extracellular matrix into the blood stream. While a particle size of less than 150 nm may be desired for effective hepatocyte delivery due to the size of the endothelial fenestrae (see, Akinc et al., Mol Ther. 2009 17:872-879, the contents of which are herein incorporated by reference in its entirety), use of a lipidoid-formulated saRNA to deliver the formulation to other cells types including, but not limited to, endothelial cells, myeloid cells, and muscle cells may not be similarly size-limited. Use of lipidoid formulations to deliver siRNA in vivo to other non-hepatocyte cells such as myeloid cells and endothelium has been reported (see Akinc et al., Nat Biotechnol. 2008 26:561-569; Leuschner et al., Nat Biotechnol. 2011 29:1005-1010; Cho et al. Adv. Funct. Mater. 2009 19:3112-3118; 8^{th} International Judah Folkman Conference, Cambridge, MA Oct. 8-9, 2010; the contents of each of which is herein incorporated by reference in its entirety). Effective delivery to myeloid cells, such as monocytes, lipidoid formulations may have a similar component molar ratio. Different ratios of lipidoids and other components including, but not limited to, disteroylphosphatidyl choline, cholesterol and PEG-DMG, may be used to optimize the formulation of saRNA for delivery to different cell types including, but not limited to, hepatocytes, myeloid cells, muscle cells, etc. For example, the component molar ratio may include, but is not limited to, 50% C12-200, 10% disteroylphosphatidyl choline, 38.5% cholesterol, and % 1.5 PEG-DMG (see Leuschner et al., Nat Biotechnol 2011 29:1005-1010; the contents of which are herein incorporated by reference in its entirety). The use of lipidoid formulations for the localized delivery of nucleic acids to cells (such as, but not limited to, adipose cells and muscle cells) via either subcutaneous or intramuscular delivery, may not require all of the formulation components desired for systemic delivery, and as such may comprise only the lipidoid and saRNA.

### Liposomes, Lipoplexes, and Lipid Nanoparticles

[0143] The saRNA of the invention can be formulated using one or more liposomes, lipoplexes, or lipid nanoparticles. In one embodiment, pharmaceutical compositions of saRNA include liposomes. Liposomes are artificially-prepared vesicles which may primarily be composed of a lipid bilayer and may be used as a delivery vehicle for the administration of nutrients and pharmaceutical formulations. Liposomes can be of different sizes such as, but not limited to, a multilamellar vesicle (MLV) which may be hundreds of nanometers in diameter and may contain a series of concentric bilayers separated by narrow aqueous compartments, a small unicellular vesicle (SUV) which may be smaller than 50 nm in diameter, and a large unilamellar vesicle (LUV) which may be between 50 and 500 nm in diameter. Liposome design may include, but is not limited to, opsonins or ligands in order to improve the attachment of liposomes to unhealthy tissue or to activate events such as, but not limited to, endocytosis. Liposomes may contain a low or a high pH in order to improve the delivery of the pharmaceutical formulations.

[0144] The formation of liposomes may depend on the physicochemical characteristics such as, but not limited to, the pharmaceutical formulation entrapped and the liposomal ingredients, the nature of the medium in which the lipid vesicles are dispersed, the effective concentration of the entrapped substance and its potential toxicity, any additional processes involved during the application and/or delivery of the vesicles, the optimization size, polydispersity and the shelf-life of the vesicles for the intended application, and the batch-to-batch reproducibility and possibility of large-scale production of safe and efficient liposomal products.

[0145] In one embodiment, pharmaceutical compositions described herein may include, without limitation, liposomes such as those formed from 1,2-dioleyloxy-N,N-dimethylaminopropane (DODMA) liposomes, DiLa2 liposomes from Marina Biotech (Bothell, WA), 1,2-dilinoleyloxy-3-dimethylaminopropane (DLin-DMA), 2,2-dilinoleyl-4-(2-dimethylaminoethyl)-[1,3]-dioxolane (DLin-KC2-DMA), and MC3 (US20100324120; the contents of which are herein incorporated by reference in its entirety) and liposomes which may deliver small molecule drugs such as, but not limited to, DOXIL® from Janssen Biotech, Inc. (Horsham, PA).

[0146] In one embodiment, pharmaceutical compositions described herein may include, without limitation, liposomes such as those formed from the synthesis of stabilized plasmid-lipid particles (SPLP) or stabilized nucleic acid lipid particle (SNALP) that have been previously described and shown to be suitable for oligonucleotide delivery in vitro and in vivo (see Wheeler et al. Gene Therapy. 1999 6:271-281; Zhang et al. Gene Therapy. 1999 6:1438-1447; Jeffs et al. Pharm Res. 2005 22:362-372; Morrissey et al., Nat Biotechnol. 2005 2:1002-1007; Zimmermann et al., Nature. 2006 441:111-114; Heyes et al. J Contr Rel. 2005 107:276-287; Semple et al. Nature Biotech. 2010 28:172-176; Judge et al. J Clin Invest. 2009 119:661-673; deFougerolles Hum Gene Ther. 2008 19:125-132; the contents of each of which are incorporated herein in their entireties). The original manufacture method by Wheeler et al. was a detergent dialysis method, which was later improved by Jeffs et al. and is referred to as the spontaneous vesicle formation method. The liposome formulations may be composed of 3 to 4 lipid components in addition to the saRNA. As an example a liposome can contain, but is not limited to, 55% cholesterol, 20% disteroylphosphatidyl choline (DSPC), 10% PEG-S-DSG, and 15% 1,2-dioleyloxy-N,N-dimethylaminopropane (DODMA), as described by Jeffs et al. In another example, certain liposome formulations may contain, but are not limited to, 48% cholesterol, 20% DSPC, 2% PEG-c-DMA, and 30% cationic lipid, where the cationic lipid can be 1,2-distearloxy-N,N-dimethylaminopropane (DSDMA), DODMA, DLin-DMA, or 1,2-dilinolenyloxy-3-dimethylaminopropane (DLenDMA), as described by Heyes et al. In another example, the nucleic acid-lipid particle may comprise a cationic lipid comprising from about 50 mol % to about 85 mol % of the total lipid present in the particle; a non-cationic lipid comprising from about 13 mol % to about 49.5 mol % of the total lipid present in the particle; and a conjugated lipid that inhibits aggregation of particles comprising from about 0.5 mol % to about 2 mol % of the total lipid present in the particle as described in WO2009127060 to Maclachlan et al, the contents of which are incorporated herein by reference in their entirety. In another example, the nucleic acid-lipid particle may be any nucleic acid-lipid particle disclosed in US2006008910 to Maclachlan et al., the contents of which are incorporated herein by reference in their entirety. As a non-limiting example, the nucleic acid-lipid particle may comprise a cationic lipid of Formula I, a non-cationic lipid, and a conjugated lipid that inhibits aggregation of particles.

[0147] In one embodiment, the saRNA may be formulated in a lipid vesicle which may have crosslinks between functionalized lipid bilayers.

[0148] In one embodiment, the liposome may contain a sugar-modified lipid disclosed in U.S. Pat. No. 5,595,756 to Bally et al., the contents of which are incorporated herein by reference in their entirety. The lipid may be a ganglioside and cerebroside in an amount of about 10 mol percent.

[0149] In one embodiment, the saRNA may be formulated in a liposome comprising a cationic lipid. The liposome may have a molar ratio of nitrogen atoms in the cationic lipid to the phosphates in the saRNA (N:P ratio) of between 1:1 and 20:1 as described in International Publication No. WO2013006825, the contents of which are herein incorporated by reference in its entirety. In another embodiment, the liposome may have a N:P ratio of greater than 20:1 or less than 1:1.

[0150] In one embodiment, the saRNA may be formulated in a lipid-polycation complex. The formation of the lipid-polycation complex may be accomplished by methods known in the art and/or as described in U.S. Pub. No. 20120178702, the contents of which are herein incorporated by reference in its entirety. As a non-limiting example, the polycation may include a cationic peptide or a polypeptide such as, but not limited to, polylysine, polyornithine and/or polyarginine and the cationic peptides described in International Pub. No. WO2012013326; herein incorporated by reference in its entirety. In another embodiment, the saRNA may be formulated in a lipid-polycation complex which may further include a neutral lipid such as, but not limited to, cholesterol or dioleoyl phosphatidylethanolamine (DOPE).

[0151] The liposome formulation may be influenced by, but not limited to, the selection of the cationic lipid component, the degree of cationic lipid saturation, the nature of the PEGylation, ratio of all components and biophysical parameters such as size. In one example by Semple et al. (Semple et al. Nature Biotech. 2010 28:172-176; the contents of which are herein incorporated by reference in its entirety), the liposome formulation was composed of 57.1% cationic lipid, 7.1% dipalmitoylphosphatidylcholine, 34.3% cholesterol, and 1.4% PEG-c-DMA.

[0152] In some embodiments, the ratio of PEG in the lipid nanoparticle (LNP) formulations may be increased or decreased and/or the carbon chain length of the PEG lipid may be modified from C14 to C18 to alter the pharmacokinetics and/or biodistribution of the LNP formulations. As a non-limiting example, LNP formulations may contain 1-5% of the lipid molar ratio of PEG-c-DOMG as compared to the cationic lipid, DSPC and cholesterol. In another embodiment the PEG-c-DOMG may be replaced with a PEG lipid such as, but not limited to, PEG-DSG (1,2-Distearoyl-sn-glycerol, methoxypolyethylene glycol) or PEG-DPG (1,2-Dipalmitoyl-sn-glycerol, methoxypolyethylene glycol). The cationic lipid may be selected from any lipid known in the art such as, but not limited to, DLin-MC3-DMA, DLin-DMA, C12-200 and DLin-KC2-DMA.

[0153] In one embodiment, the saRNA may be formulated in a lipid nanoparticle such as the lipid nanoparticles described in International Publication No. WO2012170930, the contents of which are herein incorporated by reference in its entirety.

[0154] In one embodiment, the cationic lipid which may be used in formulations of the present invention may be selected from, but not limited to, a cationic lipid described in International Publication Nos. WO2012040184, WO2011153120, WO2011149733, WO2011090965, WO2011043913, WO2011022460, WO2012061259, WO2012054365, WO2012044638, WO2010080724, WO201021865 and WO2008103276, U.S. Pat. Nos. 7,893,302, 7,404,969 and 8,283,333 and US Patent Publication No. US20100036115 and US20120202871; the contents of each of which is herein incorporated by reference in their entirety. In another embodiment, the cationic lipid may be selected from, but not limited to, formula A described in International Publication Nos. WO2012040184, WO2011153120, WO2011149733, WO2011090965, WO2011043913, WO2011022460, WO2012061259, WO2012054365 and WO2012044638; the contents of each of which is herein incorporated by reference in their entirety. In yet another embodiment, the cationic lipid may be selected from, but not limited to, formula CLI-CLXXIX of International Publication No. WO2008103276, formula CLI-CLXXIX of U.S. Pat. No. 7,893,302, formula CLI-CLXXXXII of U.S. Pat. No. 7,404,969 and formula I-VI of US Patent Publication No. US20100036115; the contents of each of which is herein incorporated by reference in their entirety. In yet another embodiment, the cationic lipid may be a multivalent cationic lipid such as the cationic lipid disclosed in U.S. Pat. No. 7,223,887 to Gaucheron et al., the contents of which are incorporated herein by reference in their entirety. The cationic lipid may have a positively-charged head group including two quaternary amine groups and a hydrophobic portion including four hydrocarbon chains as described in U.S. Pat. No. 7,223,887 to Gaucheron et al., the contents of which are incorporated herein by reference in their entirety. In yet another embodiment, the cationic lipid may be biodegradable as the biodegradable lipids disclosed in US20130195920 to Maier et al., the contents of which are incorporated herein by reference in their entirety. The cationic lipid may have one or more biodegradable groups located in a lipidic moiety of the cationic lipid as described in formula I-IV in US 20130195920 to Maier et al., the contents of which are incorporated herein by reference in their entirety. As a non-limiting example, the cationic lipid may be selected from (20Z,23Z)—N,N-dimethylnonacosa-20,23-dien-10-amine, (17Z,20Z)—N,N-dimemylhexacosa-17,20-dien-9-amine, (1Z,19Z)—N5N-dimethylpentacosa-l 6, 19-dien-8-amine, (13Z,16Z)—N,N-dimethyldocosa-13,16-dien-5-amine, (12Z,15Z)—N,N-dimethylhenicosa-12,15-dien-4-amine, (14Z,17Z)—N,N-dimethyltricosa-14,17-dien-6-amine, (15Z,18Z)—N,N-dimethyltetracosa-15,18-dien-7-amine, (18Z,21Z)—N,N-dimethylheptacosa-18,21-dien-10-amine, (15Z,18Z)—N,N-dimethyltetracosa-15,18-dien-5-amine, (14Z,17Z)—N,N-dimethyltricosa-14,17-dien-4-amine, (19Z,22Z)—N,N-dimeihyloctacosa-19,22-dien-9-amine, (18Z,21 Z)—N,N-dimethylheptacosa-18,21-dien-8-amine, (17Z,20Z)—N,N-dimethylhexacosa-17,20-dien-7-amine, (16Z,19Z)—N,N-dimethylpentacosa-16,19-dien-6-amine, (22Z,25Z)—N,N-dimethylhentriaconta-22,25-dien-10-amine, (21Z,24Z)—N,N-dimethyltriaconta-21,24-dien-9-amine, (18Z)—N,N-dimetylheptacos-18-en-10-amine, (17Z)—N,N-dimethylhexacos-17-en-9-amine, (19Z,22Z)—N,N-dimethyloctacosa-19,22-dien-7-amine, N,N-dimethylheptacosan-10-amine, (20Z,23Z)—N-ethyl-N-methylnonacosa-20,23-dien-10-amine, 1-[(11Z,14Z)-1-nonylicosa-11,14-dien-1-yl] pyrrolidine, (20Z)—N,N-dimethylheptacos-20-en-l 0-amine, (15Z)—N,N-dimethyl eptacos-15-en-l 0-amine, (14Z)—N,N-dimethylnonacos-14-en-10-amine, (17Z)—N,N-dimethylnonacos-17-en-10-amine, (24Z)—N,N-dimethyltritriacont-24-en-10-amine, (20Z)—N,N-dimethylnonacos-20-en-l 0-amine, (22Z)—N,N-dimethylhentriacont-22-en-10-amine, (16Z)—N,N-dimethylpentacos-16-en-8-amine, (12Z,15Z)—N,N-dimethyl-2-nonylhenicosa-12,15-dien-1-amine, (13Z,16Z)—N,N-dimethyl-3-nonyldocosa-13,16-dien-1-amine, N,N-dimethyl-1-[(1S,2R)-2-octylcyclopropyl] eptadecan-8-amine, 1-[(1S,2R)-2-hexylcyclopropyl]-N,N-dimethylnonadecan-10-amine, N,N-dimethyl-1-[(1S,2R)-2-octylcyclopropyl]nonadecan-10-amine, N,N-dimethyl-21-[(1S,2R)-2-octylcyclopropyl]henicosan-10-amine,N,N-dimethyl-1-[(1S,2S)-2-{[(1R,2R)-2-pentylcyclopropyl]methyl}cyclopropyl]nonadecan-10-amine,N,N-dimethyl-1-[(1S,2R)-2-octylcyclopropyl]hexadecan-8-amine, N,N-dimethyl-[(1R,2S)-2-undecylcyclopropyl]tetradecan-5-amine, N,N-dimethyl-3-{7-[(1S,2R)-2-octylcyclopropyl]heptyl} dodecan-1-amine, 1-[(1R,2S)-2-heptylcyclopropyl]-N,N-dimethyloctadecan-9-amine, 1-[(1S,2R)-2-decylcyclopropyl]-N,N-dimethylpentadecan-6-amine, N,N-dimethyl-1-[(1S,2R)-2-octylcyclopropyl]pentadecan-8-amine, R—N,N-dimethyl-1-[(9Z,12Z)-octadeca-9,12-dien-1-yloxy]-3-(octyloxy)propan-2-amine, S—N,N-dimethyl-1-[(9Z,12Z)-octadeca-9,12-dien-1-yloxy]-3-(octyloxy)propan-2-amine, 1-{2-[(9Z,12Z)-octadeca-9,12-dien-1-yloxy]-1-[(octyloxy)methyl]ethyl}pyrrolidine, (2S)—N,N-dimethyl-1-[(9Z,12Z)-octadeca-9,12-dien-1-yloxy]-3-[(5Z)-oct-5-en-1-yloxy]propan-2-amine, 1-{2-[(9Z,12Z)-octadeca-9,12-dien-1-yloxy]-1-[(octyloxy)methyl]ethyl}azetidine, (2S)-1-(hexyloxy)-N,N-dimethyl-3-[(9Z,12Z)-octadeca-9,12-dien-1-yloxy]propan-2-amine, (2S)-1-(heptyloxy)-N,N-dimethyl-3-[(9Z,12Z)-octadeca-9,12-dien-1-yloxy]propan-2-amine, N,N-dimethyl-1-(nonyloxy)-3-[(9Z,12Z)-octadeca-9,12-dien-1-yloxy]propan-2-amine, N,N-dimethyl-1-[(9Z)-octadec-9-en-1-yloxy]-3-(octyloxy)propan-2-amine; (2S)—N,N-dimethyl-1-[(6Z,9Z,12Z)-octadeca-6,9,12-trien-1-yloxy]-3-(octyloxy)propan-2-amine, (2S)-1-[(11Z,14Z)-icosa-11,14-dien-1-yloxy]-N,N-dimethyl-3-(pentyloxy)propan-2-amine, (2S)-1-(hexyloxy)-3-[(11Z,14Z)-icosa-11,14-dien-1-yloxy]-N,N-dimethylpropan-2-amine, 1-[(11Z,14Z)-icosa-11,14-dien-1-yloxy]-N,N-dimethyl-3-(octyloxy)propan-2-amine, 1-[(13Z,16Z)-docosa-13,16-dien-1-yloxy]-N,N-dimethyl-3-(octyloxy)propan-2-amine, (2S)-1-[(13Z,16Z)-docosa-13,16-dien-1-yloxy]-3-(hexyloxy)-N,N-dimethylpropan-2-amine, (2S)-1-[(13Z)-docos-13-en-1-yloxy]-3-(hexyloxy)-N,N-dimethylpropan-2-amine, 1-[(13Z)-docos-13-en-1-yloxy]-N,N-dimethyl-3-(octyloxy)propan-2-amine, 1-[(9Z)-hexadec-9-en-1-yloxy]-N,N-dimethyl-3-(octyloxy)propan-2-amine, (2R)—N,N-dimethyl-H(1-metoyloctyl)oxy]-3-[(9Z,12Z)-octadeca-9,12-dien-1-yloxy]propan-2-amine, (2R)-1-[(3,7-dimethyloctyl)oxy]-N,N-dimethyl-3-[(9Z,12Z)-octadeca-9,12-dien-1-yloxy]propan-2-amine, N,N-dimethyl-1-(octyloxy)-3-({8-[(1S,2S)-2-{[(1R,2R)-2-pentylcyclopropyl]methyl}cyclopropyl]octyl}oxy)propan-2-amine, N,N-dimethyl-1-{[8-(2-oc1ylcyclopropyl)octyl]oxy}-3-(octyloxy)propan-2-amine and (1lE,20Z,23Z)—N,N-dimethylnonacosa-l1,20,2-trien-10-amine or a pharmaceutically acceptable salt or stereoisomer thereof.

[0155] In one embodiment, the lipid may be a cleavable lipid such as those described in International Publication No. WO2012170889, the contents of which is herein incorporated by reference in its entirety.

[0156] In one embodiment, the nanoparticles described herein may comprise at least one cationic polymer described herein and/or known in the art.

[0157] In one embodiment, the cationic lipid may be synthesized by methods known in the art and/or as described in International Publication Nos. WO2012040184, WO2011153120, WO2011149733, WO2011090965, WO2011043913, WO2011022460, WO2012061259, WO2012054365, WO2012044638, WO2010080724 and WO201021865; the contents of each of which is herein incorporated by reference in their entirety.

[0158] In one embodiment, the LNP formulations of the saRNA may contain PEG-c-DOMG at 3% lipid molar ratio. In another embodiment, the LNP formulations of the saRNA may contain PEG-c-DOMG at 1.5% lipid molar ratio.

[0159] In one embodiment, the pharmaceutical compositions of the saRNA may include at least one of the PEGylated lipids described in International Publication No. 2012099755, the contents of which is herein incorporated by reference in its entirety.

[0160] In one embodiment, the LNP formulation may contain PEG-DMG 2000 (1,2-dimyristoyl-sn-glycero-3-phophoethanolamine-N-[methoxy(polyethylene glycol)-2000). In one embodiment, the LNP formulation may contain PEG-DMG 2000, a cationic lipid known in the art and at least one other component. In another embodiment, the LNP formulation may contain PEG-DMG 2000, a cationic lipid known in the art, DSPC and cholesterol. As a non-limiting example, the LNP formulation may contain PEG-DMG 2000, DLin-DMA, DSPC and cholesterol. As another non-limiting example the LNP formulation may contain PEG-DMG 2000, DLin-DMA, DSPC and cholesterol in a molar ratio of 2:40:10:48 (see e.g., Geall et al., Nonviral delivery of self-amplifying RNA vaccines, PNAS 2012; PMID: 22908294; herein incorporated by reference in its entirety). As another non-limiting example, the saRNA described herein may be formulated in a nanoparticle to be delivered by a parenteral route as described in U.S. Pub. No. 20120207845; the contents of which is herein incorporated by reference in its entirety. The cationic lipid may also be the cationic lipids disclosed in US20130156845 to Manoharan et al. and US 20130129785 to Manoharan et al., WO 2012047656 to Wasan et al., WO 2010144740 to Chen et al., WO 2013086322 to Ansell et al., or WO 2012016184 to Manoharan et al., the contents of each of which are incorporated herein by reference in their entirety.

[0161] In one embodiment, the saRNA of the present invention may be formulated with a plurality of cationic lipids, such as a first and a second cationic lipid as described in US20130017223 to Hope et al., the contents of which are incorporated herein by reference in their entirety. The first cationic lipid can be selected on the basis of a first property and the second cationic lipid can be selected on the basis of a second property, where the properties may be determined as outlined in US20130017223, the contents of which are herein incorporated by reference in its entirety. In one embodiment, the first and second properties are complementary.

[0162] In another embodiment, the saRNA may be formulated with a lipid particle comprising one or more cationic lipids and one or more second lipids, and one or more nucleic acids, wherein the lipid particle comprises a solid core, as described in US Patent Publication No. US20120276209 to Cullis et al., the contents of which are incorporated herein by reference in their entirety.

[0163] In one embodiment, the saRNA of the present invention may be complexed with a cationic amphiphile in an oil-in-water (o/w) emulsion such as described in EP2298358 to Satishchandran et al., the contents of which are incorporated herein by reference in their entirety. The cationic amphiphile may be a cationic lipid, modified or unmodified spermine, bupivacaine, or benzalkonium chloride and the oil may be a vegetable or an animal oil. As a non-limiting example, at least 10% of the nucleic acid-cationic amphiphile complex is in the oil phase of the oil-in-water emulsion (see e.g., the complex described in European Publication No. EP2298358 to Satishchandran et al., the contents of which are herein incorporated by reference in its entirety).

[0164] In one embodiment, the saRNA of the present invention may be formulated with a composition comprising a mixture of cationic compounds and neutral lipids. As a non-limiting example, the cationic compounds may be formula (I) disclosed in WO 1999010390 to Ansell et al., the contents of which are disclosed herein by reference in their entirety, and the neutral lipid may be selected from the group consisting of diacylphosphatidylcholine, diacylphosphatidylethanolamine, ceramide and sphingomyelin.

[0165] In one embodiment, the LNP formulation may be formulated by the methods described in International Publication Nos. WO2011127255 or WO2008103276, each of which are herein incorporated by reference in their entirety. As a non-limiting example, the saRNA of the present invention may be encapsulated in any of the lipid nanoparticle (LNP) formulations described in WO2011127255 and/or WO2008103276; the contents of each of which are herein incorporated by reference in their entirety.

[0166] In one embodiment, the LNP formulations described herein may comprise a polycationic composition. As a non-limiting example, the polycationic composition may be selected from formula 1-60 of US Patent Publication No. US20050222064; the contents of which is herein incorporated by reference in its entirety. In another embodiment, the LNP formulations comprising a polycationic composition may be used for the delivery of the saRNA described herein in vivo and/or in vitro.

[0167] In one embodiment, the LNP formulations described herein may additionally comprise a permeability enhancer molecule. Non-limiting permeability enhancer molecules are described in US Patent Publication No. US20050222064; the contents of which is herein incorporated by reference in its entirety.

[0168] In one embodiment, the pharmaceutical compositions may be formulated in liposomes such as, but not limited to, DiLa2 liposomes (Marina Biotech, Bothell, WA), SMARTICLES®/NOV340 (Marina Biotech, Bothell, WA), neutral DOPC (1,2-dioleoyl-sn-glycero-3-phosphocholine) based liposomes (e.g., siRNA delivery for ovarian cancer (Landen et al. Cancer Biology & Therapy 2006 5(12)1708-1713); the contents of which is herein incorporated by reference in its entirety) and hyaluronan-coated liposomes (Quiet Therapeutics, Israel). In some embodiments, the pharmaceutical compositions may be formulated with any amphoteric liposome disclosed in WO 2008/043575 to Panzner and U.S. Pat. No. 8,580,297 to Essler et al., the contents of which are incorporated herein by reference in their entirety. The amphoteric liposome may comprise a mixture of lipids including a cationic amphiphile, an anionic amphiphile and optional one or more neutral amphiphiles. The amphoteric liposome may comprise amphoteric compounds based on amphiphilic molecules, the head groups of which being substituted with one or more amphoteric groups. In some embodiments, the pharmaceutical compositions may be formulated with an amphoteric lipid comprising one or more amphoteric groups having an isoelectric point between 4 and 9, as disclosed in US 20140227345 to Essler et al., the contents of which are incorporated herein by reference in their entirety.

[0169] The nanoparticle formulations may be a carbohydrate nanoparticle comprising a carbohydrate carrier and a nucleic acid molecule (e.g., saRNA). As a non-limiting example, the carbohydrate carrier may include, but is not limited to, an anhydride-modified phytoglycogen or glycogen-type material, phtoglycogen octenyl succinate, phytoglycogen beta-dextrin, anhydride-modified phytoglycogen beta-dextrin. (See e.g., International Publication No. WO2012109121; the contents of which is herein incorporated by reference in its entirety).

[0170] Lipid nanoparticle formulations may be improved by replacing the cationic lipid with a biodegradable cationic lipid which is known as a rapidly eliminated lipid nanoparticle (reLNP). Ionizable cationic lipids, such as, but not limited to, DLinDMA, DLin-KC2-DMA, and DLin-MC3-DMA, have been shown to accumulate in plasma and tissues over time and may be a potential source of toxicity. The rapid metabolism of the rapidly eliminated lipids can improve the tolerability and therapeutic index of the lipid nanoparticles by an order of magnitude from a 1 mg/kg dose to a 10 mg/kg dose in rat. Inclusion of an enzymatically degraded ester linkage can improve the degradation and metabolism profile of the cationic component, while still maintaining the activity of the reLNP formulation. The ester linkage can be internally located within the lipid chain or it may be terminally located at the terminal end of the lipid chain. The internal ester linkage may replace any carbon in the lipid chain.

[0171] In one embodiment, the saRNA may be formulated as a lipoplex, such as, without limitation, the ATUPLEX™ system, the DACC system, the DBTC system and other siRNA-lipoplex technology from Silence Therapeutics (London, United Kingdom), STEMFECT™ from STEMGENT® (Cambridge, MA), and polyethylenimine (PEI) or protamine-based targeted and non-targeted delivery of nucleic acids (Aleku et al. Cancer Res. 2008 68:9788-9798; Strumberg et al. Int J Clin Pharmacol Ther 2012 50:76-78; Santel et al., Gene Ther 2006 13:1222-1234; Santel et al., Gene Ther 2006 13:1360-1370; Gutbier et al., Pulm Pharmacol. Ther. 2010 23:334-344; Kaufmann et al. Microvasc Res 2010 80:286-293 Weide et al. J Immunother. 2009 32:498-507; Weide et al. J Immunother. 2008 31:180-188; Pascolo Expert Opin. Biol. Ther. 4:1285-1294; Fotin-Mleczek et al., 2011 J. Immunother. 34:1-15; Song et al., Nature Biotechnol. 2005, 23:709-717; Peer et al., Proc Natl Acad Sci USA. 2007 6; 104:4095-4100; deFougerolles Hum Gene Ther. 2008 19:125-132; the contents of each of which are incorporated herein by reference in its entirety).

[0172] In one embodiment such formulations may also be constructed or compositions altered such that they passively or actively are directed to different cell types in vivo, including but not limited to hepatocytes, immune cells, tumor cells, endothelial cells, antigen presenting cells, and leukocytes (Akinc et al. Mol Ther. 2010 18:1357-1364; Song et al., Nat Biotechnol. 2005 23:709-717; Judge et al., J Clin Invest. 2009 119:661-673; Kaufmann et al., Microvasc Res 2010 80:286-293; Santel et al., Gene Ther 2006 13:1222-1234; Santel et al., Gene Ther 2006 13:1360-1370; Gutbier et al., Pulm Pharmacol. Ther. 2010 23:334-344; Basha et al., Mol. Ther. 2011 19:2186-2200; Fenske and Cullis, Expert Opin Drug Deliv. 2008 5:25-44; Peer et al., Science. 2008 319:627-630; Peer and Lieberman, Gene Ther. 2011 18:1127-1133; the contents of each of which are incorporated herein by reference in its entirety). One example of passive targeting of formulations to liver cells includes the DLin-DMA, DLin-KC2-DMA and DLin-MC3-DMA-based lipid nanoparticle formulations which have been shown to bind to apolipoprotein E and promote binding and uptake of these formulations into hepatocytes in vivo (Akinc et al. Mol Ther. 2010 18:1357-1364; the contents of which is herein incorporated by reference in its entirety). Formulations can also be selectively targeted through expression of different ligands on their surface as exemplified by, but not limited by, folate, transferrin, N-acetylgalactosamine (GalNAc), and antibody targeted approaches (Kolhatkar et al., Curr Drug Discov Technol. 2011 8:197-206; Musacchio and Torchilin, Front Biosci. 2011 16:1388-1412; Yu et al., Mol Membr Biol. 2010 27:286-298; Patil et al., Crit Rev Ther Drug Carrier Syst. 2008 25:1-61; Benoit et al., Biomacromolecules. 2011 12:2708-2714; Zhao et al., Expert Opin Drug Deliv. 2008 5:309-319; Akinc et al., Mol Ther. 2010 18:1357-1364; Srinivasan et al., Methods Mol Biol. 2012 820:105-116; Ben-Arie et al., Methods Mol Biol. 2012 757:497-507; Peer 2010 J Control Release. 20:63-68; Peer et al., Proc Natl Acad Sci USA. 2007 104:4095-4100; Kim et al., Methods Mol Biol. 2011 721:339-353; Subramanya et al., Mol Ther. 2010 18:2028-2037; Song et al., Nat Biotechnol. 2005 23:709-717; Peer et al., Science. 2008 319:627-630; Peer and Lieberman, Gene Ther. 2011 18:1127-1133; the contents of each of which are incorporated herein by reference in its entirety).

[0173] In one embodiment, the saRNA is formulated as a solid lipid nanoparticle. A solid lipid nanoparticle (SLN) may be spherical with an average diameter between 10 to 1000 nm. SLN possess a solid lipid core matrix that can solubilize lipophilic molecules and may be stabilized with surfactants and/or emulsifiers. In a further embodiment, the lipid nanoparticle may be a self-assembly lipid-polymer nanoparticle (see Zhang et al., ACS Nano, 2008, 2 (8), pp 1696-1702; the contents of which are herein incorporated by reference in its entirety).

[0174] In one embodiment, the saRNA of the present invention can be formulated for controlled release and/or targeted delivery. As used herein, “controlled release” refers to a pharmaceutical composition or compound release profile that conforms to a particular pattern of release to effect a therapeutic outcome. In one embodiment, the saRNA may be encapsulated into a delivery agent described herein and/or known in the art for controlled release and/or targeted delivery. As used herein, the term “encapsulate” means to enclose, surround or encase. As it relates to the formulation of the compounds of the invention, encapsulation may be substantial, complete or partial. The term “substantially encapsulated” means that at least greater than 50, 60, 70, 80, 85, 90, 95, 96, 97, 98, 99, 99.9, 99.9 or greater than 99.999% of the pharmaceutical composition or compound of the invention may be enclosed, surrounded or encased within the delivery agent. “Partially encapsulated” means that less than 10, 10, 20, 30, 40 50 or less of the pharmaceutical composition or compound of the invention may be enclosed, surrounded or encased within the delivery agent. Advantageously, encapsulation may be determined by measuring the escape or the activity of the pharmaceutical composition or compound of the invention using fluorescence and/or electron micrograph. For example, at least 1, 5, 10, 20, 30, 40, 50, 60, 70, 80, 85, 90, 95, 96, 97, 98, 99, 99.9, 99.99 or greater than 99.99% of the pharmaceutical composition or compound of the invention are encapsulated in the delivery agent.

[0175] In another embodiment, the saRNA may be encapsulated into a lipid nanoparticle or a rapidly eliminated lipid nanoparticle and the lipid nanoparticles or a rapidly eliminated lipid nanoparticle may then be encapsulated into a polymer, hydrogel and/or surgical sealant described herein and/or known in the art. As a non-limiting example, the polymer, hydrogel or surgical sealant may be PLGA, ethylene vinyl acetate (EVAc), poloxamer, GELSITE® (Nanotherapeutics, Inc. Alachua, FL), HYLENEX® (Halozyme Therapeutics, San Diego CA), surgical sealants such as fibrinogen polymers (Ethicon Inc. Cornelia, GA), TISSELL® (Baxter International, Inc Deerfield, IL), PEG-based sealants, and COSEAL® (Baxter International, Inc Deerfield, IL).

[0176] In another embodiment, the lipid nanoparticle may be encapsulated into any polymer known in the art which may form a gel when injected into a subject. As another non-limiting example, the lipid nanoparticle may be encapsulated into a polymer matrix which may be biodegradable.

[0177] In one embodiment, the saRNA formulation for controlled release and/or targeted delivery may also include at least one controlled release coating. Controlled release coatings include, but are not limited to, OPADRY®, polyvinylpyrrolidone/vinyl acetate copolymer, polyvinylpyrrolidone, hydroxypropyl methylcellulose, hydroxypropyl cellulose, hydroxyethyl cellulose, EUDRAGIT RL®, EUDRAGIT RS® and cellulose derivatives such as ethylcellulose aqueous dispersions (AQUACOAT® and SURELEASE®).

[0178] In one embodiment, the controlled release and/or targeted delivery formulation may comprise at least one degradable polyester which may contain polycationic side chains. Degradeable polyesters include, but are not limited to, poly(serine ester), poly(L-lactide-co-L-lysine), poly(4-hydroxy-L-proline ester), and combinations thereof. In another embodiment, the degradable polyesters may include a PEG conjugation to form a PEGylated polymer.

[0179] In one embodiment, the saRNA of the present invention may be formulated with a targeting lipid with a targeting moiety such as the targeting moieties disclosed in US20130202652 to Manoharan et al., the contents of which are incorporated herein by reference in their entirety. As a non-limiting example, the targeting moiety of formula I of US 20130202652 to Manoharan et al. may selected in order to favor the lipid being localized with a desired organ, tissue, cell, cell type or subtype, or organelle. Non-limiting targeting moieties that are contemplated in the present invention include transferrin, anisamide, an RGD peptide, prostate specific membrane antigen (PSMA), fucose, an antibody, or an aptamer.

[0180] In one embodiment, the saRNA of the present invention may be encapsulated in a therapeutic nanoparticle. Therapeutic nanoparticles may be formulated by methods described herein and known in the art such as, but not limited to, International Pub Nos. WO2010005740, WO2010030763, WO2010005721, WO2010005723, WO2012054923, US Pub. Nos. US20110262491, US20100104645, US20100087337, US20100068285, US20110274759, US20100068286 and US20120288541 and U.S. Pat. Nos. 8,206,747, 8,293,276, 8,318,208 and 8,318,211; the contents of each of which are herein incorporated by reference in their entirety. In another embodiment, therapeutic polymer nanoparticles may be identified by the methods described in US Pub No. US20120140790, the contents of which are herein incorporated by reference in its entirety.

[0181] In one embodiment, the therapeutic nanoparticle may be formulated for sustained release. As used herein, “sustained release” refers to a pharmaceutical composition or compound that conforms to a release rate over a specific period of time. The period of time may include, but is not limited to, hours, days, weeks, months and years. As a non-limiting example, the sustained release nanoparticle may comprise a polymer and a therapeutic agent such as, but not limited to, the saRNA of the present invention (see International Pub No. 2010075072 and US Pub No. US20100216804, US20110217377 and US20120201859, the contents of each of which are herein incorporated by reference in their entirety).

[0182] In one embodiment, the therapeutic nanoparticles may be formulated to be target specific. As a non-limiting example, the therapeutic nanoparticles may include a corticosteroid (see International Pub. No. WO2011084518; the contents of which are herein incorporated by reference in its entirety). In one embodiment, the therapeutic nanoparticles may be formulated to be cancer specific. As a non-limiting example, the therapeutic nanoparticles may be formulated in nanoparticles described in International Pub No. WO2008121949, WO2010005726, WO2010005725, WO2011084521 and US Pub No. US20100069426, US20120004293 and US20100104655, the contents of each of which are herein incorporated by reference in their entirety.

[0183] In one embodiment, the nanoparticles of the present invention may comprise a polymeric matrix. As a non-limiting example, the nanoparticle may comprise two or more polymers such as, but not limited to, polyethylenes, polycarbonates, polyanhydrides, polyhydroxyacids, polypropylfumerates, polycaprolactones, polyamides, polyacetals, polyethers, polyesters, poly(orthoesters), polycyanoacrylates, polyvinyl alcohols, polyurethanes, polyphosphazenes, polyacrylates, polymethacrylates, polycyanoacrylates, polyureas, polystyrenes, polyamines, polylysine, poly(ethylene imine), poly(serine ester), poly(L-lactide-co-L-lysine), poly(4-hydroxy-L-proline ester) or combinations thereof.

[0184] In one embodiment, the therapeutic nanoparticle comprises a diblock copolymer. In one embodiment, the diblock copolymer may include PEG in combination with a polymer such as, but not limited to, polyethylenes, polycarbonates, polyanhydrides, polyhydroxyacids, polypropylfumerates, polycaprolactones, polyamides, polyacetals, polyethers, polyesters, poly(orthoesters), polycyanoacrylates, polyvinyl alcohols, polyurethanes, polyphosphazenes, polyacrylates, polymethacrylates, polycyanoacrylates, polyureas, polystyrenes, polyamines, polylysine, poly(ethylene imine), poly(serine ester), poly(L-lactide-co-L-lysine), poly(4-hydroxy-L-proline ester) or combinations thereof.

[0185] As a non-limiting example the therapeutic nanoparticle comprises a PLGA-PEG block copolymer (see US Pub. No. US20120004293 and U.S. Pat. No. 8,236,330, each of which is herein incorporated by reference in their entirety). In another non-limiting example, the therapeutic nanoparticle is a stealth nanoparticle comprising a diblock copolymer of PEG and PLA or PEG and PLGA (see U.S. Pat. No. 8,246,968 and International Publication No. WO2012166923, the contents of each of which is herein incorporated by reference in its entirety).

[0186] In one embodiment, the therapeutic nanoparticle may comprise a multiblock copolymer such as, but not limited to the multiblock copolymers described in U.S. Pat. Nos. 8,263,665 and 8,287,910; the contents of each of which is herein incorporated by reference in its entirety.

[0187] In one embodiment, the block copolymers described herein may be included in a polyion complex comprising a non-polymeric micelle and the block copolymer. (See e.g., U.S. Pub. No. 20120076836; the contents of which are herein incorporated by reference in its entirety).

[0188] In one embodiment, the therapeutic nanoparticle may comprise at least one acrylic polymer. Acrylic polymers include but are not limited to, acrylic acid, methacrylic acid, acrylic acid and methacrylic acid copolymers, methyl methacrylate copolymers, ethoxyethyl methacrylates, cyanoethyl methacrylate, amino alkyl methacrylate copolymer, poly(acrylic acid), poly(methacrylic acid), polycyanoacrylates and combinations thereof.

[0189] In one embodiment, the therapeutic nanoparticles may comprise at least one amine-containing polymer such as, but not limited to polylysine, polyethylene imine, poly(amidoamine) dendrimers, poly(beta-amino esters) (See e.g., U.S. Pat. No. 8,287,849; the contents of which are herein incorporated by reference in its entirety) and combinations thereof.

[0190] In one embodiment, the therapeutic nanoparticles may comprise at least one degradable polyester which may contain polycationic side chains. Degradable polyesters include, but are not limited to, poly(serine ester), poly(L-lactide-co-L-lysine), poly(4-hydroxy-L-proline ester), and combinations thereof. In another embodiment, the degradable polyesters may include a PEG conjugation to form a PEGylated polymer.

[0191] In another embodiment, the therapeutic nanoparticle may include a conjugation of at least one targeting ligand. The targeting ligand may be any ligand known in the art such as, but not limited to, a monoclonal antibody. (Kirpotin et al, Cancer Res. 2006 66:6732-6740; the contents of which are herein incorporated by reference in its entirety).

[0192] In one embodiment, the therapeutic nanoparticle may be formulated in an aqueous solution which may be used to target cancer (see International Pub No. WO2011084513 and US Pub No. US20110294717, the contents of each of which is herein incorporated by reference in their entirety).

[0193] In one embodiment, the saRNA may be encapsulated in, linked to and/or associated with synthetic nanocarriers. Synthetic nanocarriers include, but are not limited to, those described in International Pub. Nos. WO2010005740, WO2010030763, WO201213501, WO2012149252, WO2012149255, WO2012149259, WO2012149265, WO2012149268, WO2012149282, WO2012149301, WO2012149393, WO2012149405, WO2012149411, WO2012149454 and WO2013019669, and US Pub. Nos. US20110262491, US20100104645, US20100087337 and US20120244222, the contents of each of which are herein incorporated by reference in their entirety. The synthetic nanocarriers may be formulated using methods known in the art and/or described herein. As a non-limiting example, the synthetic nanocarriers may be formulated by the methods described in International Pub Nos. WO2010005740, WO2010030763 and WO201213501 and US Pub. Nos. US20110262491, US20100104645, US20100087337 and US2012024422, the contents of each of which are herein incorporated by reference in their entirety. In another embodiment, the synthetic nanocarrier formulations may be lyophilized by methods described in International Pub. No. WO2011072218 and U.S. Pat. No. 8,211,473; the contents of each of which are herein incorporated by reference in their entirety.

[0194] In one embodiment, the synthetic nanocarriers may contain reactive groups to release the saRNA described herein (see International Pub. No. WO20120952552 and US Pub No. US20120171229, the contents of each of which are herein incorporated by reference in their entirety).

[0195] In one embodiment, the synthetic nanocarriers may be formulated for targeted release. In one embodiment, the synthetic nanocarrier may be formulated to release the saRNA at a specified pH and/or after a desired time interval. As a non-limiting example, the synthetic nanoparticle may be formulated to release the saRNA after 24 hours and/or at a pH of 4.5 (see International Pub. Nos. WO2010138193 and WO2010138194 and US Pub Nos. US20110020388 and US20110027217, the contents of each of which is herein incorporated by reference in their entireties).

[0196] In one embodiment, the synthetic nanocarriers may be formulated for controlled and/or sustained release of the saRNA described herein. As a non-limiting example, the synthetic nanocarriers for sustained release may be formulated by methods known in the art, described herein and/or as described in International Pub No. WO2010138192 and US Pub No. 20100303850, the contents each of which is herein incorporated by reference in their entirety.

[0197] In one embodiment, the nanoparticle may be optimized for oral administration. The nanoparticle may comprise at least one cationic biopolymer such as, but not limited to, chitosan or a derivative thereof. As a non-limiting example, the nanoparticle may be formulated by the methods described in U.S. Pub. No. 20120282343; the contents of which are herein incorporated by reference in its entirety.

[0198] In one embodiment, the saRNA of the present invention may be formulated in a modular composition such as described in U.S. Pat. No. 8,575,123 to Manoharan et al., the contents of which are herein incorporated by reference in their entirety. As a non-limiting example, the modular composition may comprise a nucleic acid, e.g., the saRNA of the present invention, at least one endosomolytic component, and at least one targeting ligand. The modular composition may have a formula such as any formula described in U.S. Pat. No. 8,575,123 to Manoharan et al., the contents of which are herein incorporated by reference in their entirety.

[0199] In one embodiment, the saRNA of the present invention may be encapsulated in the lipid formulation to form a stable nucleic acid-lipid particle (SNALP) such as described in U.S. Pat. No. 8,546,554 to de Fougerolles et al., the contents of which are incorporated here by reference in their entirety. The lipid may be cationic or non-cationic. In one non-limiting example, the lipid to nucleic acid ratio (mass/mass ratio) (e.g., lipid to saRNA ratio) will be in the range of from about 1:1 to about 50:1, from about 1:1 to about 25:1, from about 3:1 to about 15:1, from about 4:1 to about 10:1, from about 5:1 to about 9:1, or about 6:1 to about 9:1, or 5:1, 6:1, 7:1, 8:1, 9:1, 10:1, or 11:1. In another example, the SNALP includes 40% 2,2-Dilinoleyl-4-dimethylaminoethyl-[1,3]-dioxolane (Lipid A), 10% dioleoylphosphatidylcholine (DSPC), 40% cholesterol, 10% polyethyleneglycol (PEG)-C-DOMG (mole percent) with a particle size of 63.0±20 nm and a 0.027 nucleic acid/lipid ratio. In another embodiment, the saRNA of the present invention may be formulated with a nucleic acid-lipid particle comprising an endosomal membrane destabilizer as disclosed in U.S. Pat. No. 7,189,705 to Lam et al., the contents of which are incorporated herein by reference in their entirety. As a non-limiting example, the endosomal membrane destabilizer may be a C²⁺ ion.

[0200] In one embodiment, the saRNA of the present invention may be formulated with formulated lipid particles (FLiPs) disclosed in U.S. Pat. No. 8,148,344 to Akine et al., the contents of which are herein incorporated by reference in their entirety. Akine et al. teach that FLiPs may comprise at least one of a single or double stranded oligonucleotide, where the oligonucleotide has been conjugated to a lipophile and at least one of an emulsion or liposome to which the conjugated oligonucleotide has been aggregated, admixed or associated. These particles have surprisingly been shown to effectively deliver oligonucleotides to heart, lung and muscle disclosed in U.S. Pat. No. 8,148,344 to Akine et al., the contents of which are herein incorporated by reference in their entirety.

[0201] In one embodiment, the saRNA of the present invention may be delivered to a cell using a composition comprising an expression vector in a lipid formulation as described in U.S. Pat. No. 6,086,913 to Tam et al., the contents of which are incorporated herein by reference in their entirety. The composition disclosed by Tam is serum-stable and comprises an expression vector comprising first and second inverted repeated sequences from an adeno associated virus (AAV), a rep gene from AAV, and a nucleic acid fragment. The expression vector in Tam is complexed with lipids.

[0202] In one embodiment, the saRNA of the present invention may be formulated with a lipid formulation disclosed in US 20120270921 to de Fougerolles et al., the contents of which are incorporated herein by reference in their entirety. In one non-limiting example, the lipid formulation may include a cationic lipid having the formula A described in US 20120270921, the contents of which are herein incorporated by reference in its entirety. In another non-limiting example, the compositions of exemplary nucleic acid-lipid particles disclosed in Table A of US 20120270921, the contents of which are incorporated herein by reference in their entirety, may be used with the saRNA of the present invention.

[0203] In one embodiment, the saRNA of the present invention may be fully encapsulated in a lipid particle disclosed in US 20120276207 to Maurer et al., the contents of which are incorporated herein by reference in their entirety. The particles may comprise a lipid composition comprising preformed lipid vesicles, a charged therapeutic agent, and a destabilizing agent to form a mixture of preformed vesicles and therapeutic agent in a destabilizing solvent, wherein said destabilizing solvent is effective to destabilize the membrane of the preformed lipid vesicles without disrupting the vesicles.

[0204] In one embodiment, the saRNA of the present invention may be formulated with a conjugated lipid. In a non-limiting example, the conjugated lipid may have a formula such as described in US 20120264810 to Lin et al., the contents of which are incorporated herein by reference in their entirety. The conjugate lipid may form a lipid particle which further comprises a cationic lipid, a neutral lipid, and a lipid capable of reducing aggregation.

[0205] In one embodiment, the saRNA of the present invention may be formulated in a neutral liposomal formulation such as disclosed in US 20120244207 to Fitzgerald et al., the contents of which are incorporated herein by reference in their entirety. The phrase “neutral liposomal formulation” refers to a liposomal formulation with a near neutral or neutral surface charge at a physiological pH. Physiological pH can be, e.g., about 7.0 to about 7.5, or, e.g., about 7.5, or, e.g., 7.0, 7.1, 7.2, 7.3, 7.4, or 7.5, or, e.g., 7.3, or, e.g., 7.4. An example of a neutral liposomal formulation is an ionizable lipid nanoparticle (iLNP). A neutral liposomal formulation can include an ionizable cationic lipid, e.g., DLin-KC2-DMA.

[0206] In one embodiment, the saRNA of the present invention may be formulated with a charged lipid or an amino lipid. As used herein, the term “charged lipid” is meant to include those lipids having one or two fatty acyl or fatty alkyl chains and a quaternary amino head group. The quaternary amine carries a permanent positive charge. The head group can optionally include an ionizable group, such as a primary, secondary, or tertiary amine that may be protonated at physiological pH. The presence of the quaternary amine can alter the pKa of the ionizable group relative to the pKa of the group in a structurally similar compound that lacks the quaternary amine (e.g., the quaternary amine is replaced by a tertiary amine) In some embodiments, a charged lipid is referred to as an “amino lipid.” In a non-limiting example, the amino lipid may be amino lipids described in US20110256175 to Hope et al., the contents of which are incorporated herein by reference in their entirety. For example, the amino lipids may have the structure disclosed as structure (II), DLin-K-C2-DMA, DLin-K2-DMA, DLin-K6-DMA disclosed in US20110256175 to Hope et al., the contents of which are incorporated herein by reference in their entirety. In another example, the amino lipid may have the structure (I), (II), (III), or (IV), or 4-(R)-DUn-K-DMA (VI), 4-(S)-DUn-K-DMA (V) as described in WO2009132131 to Muthiah et al., the contents of which are incorporated herein by reference in their entirety. In another example, the charged lipid used in any of the formulations described herein may be any charged lipid described in EP2509636 to Manoharan et al., the contents of which are incorporated herein by reference in their entirety.

[0207] In one embodiment, the saRNA of the present invention may be formulated with an association complex containing lipids, liposomes, or lipoplexes. In a non-limiting example, the association complex comprises one or more compounds each having a structure defined by formula (I), a PEG-lipid having a structure defined by formula (XV), a steroid and a nucleic acid disclosed in U.S. Pat. No. 8,034,376 to Manoharan et al., the contents of which are incorporated herein by reference in their entirety. The saRNA may be formulated with any association complex described in U.S. Pat. No. 8,034,376, the contents of which are herein incorporated by reference in its entirety.

[0208] In one embodiment, the saRNA of the present invention may be formulated with reverse head group lipids. As a non-limiting example, the saRNA may be formulated with a zwitterionic lipid comprising a headgroup wherein the positive charge is located near the acyl chain region and the negative charge is located at the distal end of the head group, such as a lipid having structure (A) or structure (I) described in WO2011056682 to Leung et al., the contents of which are incorporated herein by reference in their entirety.

[0209] In one embodiment, the saRNA of the present invention may be formulated in a lipid bilayer carrier. As a non-limiting example, the saRNA may be combined with a lipid-detergent mixture comprising a lipid mixture of an aggregation-preventing agent in an amount of about 5 mol % to about 20 mol %, a cationic lipid in an amount of about 0.5 mol % to about 50 mol %, and a fusogenic lipid and a detergent, to provide a nucleic acid-lipid-detergent mixture; and then dialyzing said nucleic acid-lipid-detergent mixture against a buffered salt solution to remove said detergent and to encapsulate said nucleic acid in a lipid bilayer carrier and provide a lipid bilayer-nucleic acid composition, wherein said buffered salt solution has an ionic strength sufficient to encapsulate of from about 40% to about 80% of said nucleic acid, described in WO1999018933 to Cullis et al., the contents of which are incorporated herein by reference in their entirety.

[0210] In one embodiment, the saRNA of the present invention may be formulated in a nucleic acid-lipid particle capable of selectively targeting the saRNA to a heart, liver, or tumor tissue site. For example, the nucleic acid-lipid particle may comprise (a) a nucleic acid; (b) 1.0 mole % to 45 mole % of a cationic lipid; (c) 0.0 mole % to 90 mole % of another lipid; (d) 1.0 mole % to 10 mole % of a bilayer stabilizing component; (e) 0.0 mole % to 60 mole % cholesterol; and (f) 0.0 mole % to 10 mole % of cationic polymer lipid as described in EP1328254 to Cullis et al., the contents of which are incorporated herein by reference in their entirety. Cullis teaches that varying the amount of each of said cationic lipid, bilayer stabilizing component, another lipid, cholesterol, and cationic polymer lipid can impart tissue selectivity for heart, liver, or tumor tissue site, thereby identifying a nucleic acid-lipid particle capable of selectively targeting a nucleic acid to said heart, liver, or tumor tissue site.

### Delivery

[0211] The present disclosure encompasses the delivery of saRNA for any of therapeutic, pharmaceutical, diagnostic or imaging by any appropriate route taking into consideration likely advances in the sciences of drug delivery. Delivery may be naked or formulated.

[0212] The saRNA of the present invention may be delivered to a cell naked. As used herein in, “naked” refers to delivering saRNA free from agents which promote transfection. For example, the saRNA delivered to the cell may contain no modifications. The naked saRNA may be delivered to the cell using routes of administration known in the art and described herein.

[0213] The saRNA of the present invention may be formulated, using the methods described herein. The formulations may contain saRNA which may be modified and/or unmodified. The formulations may further include, but are not limited to, cell penetration agents, a pharmaceutically acceptable carrier, a delivery agent, a bioerodible or biocompatible polymer, a solvent, and a sustained-release delivery depot. The formulated saRNA may be delivered to the cell using routes of administration known in the art and described herein.

[0214] The compositions may also be formulated for direct delivery to an organ or tissue in any of several ways in the art including, but not limited to, direct soaking or bathing, via a catheter, by gels, powder, ointments, creams, gels, lotions, and/or drops, by using substrates such as fabric or biodegradable materials coated or impregnated with the compositions, and the like. The saRNA of the present invention may also be cloned into a retroviral replicating vector (RRV) and transduced to cells.

### Administration

[0215] The saRNA of the present invention may be administered by any route which results in a therapeutically effective outcome. These include, but are not limited to enteral, gastroenteral, epidural, oral, transdermal, epidural (peridural), intracerebral (into the cerebrum), intracerebroventricular (into the cerebral ventricles), epicutaneous (application onto the skin), intradermal, (into the skin itself), subcutaneous (under the skin), nasal administration (through the nose), intravenous (into a vein), intraarterial (into an artery), intramuscular (into a muscle), intracardiac (into the heart), intraosseous infusion (into the bone marrow), intrathecal (into the spinal canal), intraperitoneal, (infusion or injection into the peritoneum), intravesical infusion, intravitreal, (through the eye), intracavernous injection, (into the base of the penis), intravaginal administration, intrauterine, extra-amniotic administration, transdermal (diffusion through the intact skin for systemic distribution), transmucosal (diffusion through a mucous membrane), insufflation (snorting), sublingual, sublabial, enema, eye drops (onto the conjunctiva), or in ear drops. In specific embodiments, compositions may be administered in a way which allows them cross the blood-brain barrier, vascular barrier, or other epithelial barrier. Routes of administration disclosed in International Publication WO 2013/090648 filed Dec. 14, 2012, the contents of which are incorporated herein by reference in their entirety, may be used to administer the saRNA of the present invention.

### Dosage Forms

[0216] A pharmaceutical composition described herein can be formulated into a dosage form described herein, such as a topical, intranasal, intratracheal, or injectable (e.g., intravenous, intraocular, intravitreal, intramuscular, intracardiac, intraperitoneal, subcutaneous). Liquid dosage forms, injectable preparations, pulmonary forms, and solid dosage forms described in International Publication WO 2013/090648 filed Dec. 14, 2012, the contents of which are incorporated herein by reference in their entirety may be used as dosage forms for the saRNA of the present invention.

### II. Methods of Use

[0217] One aspect of the present invention provides methods of using C/EBPα-saRNA and pharmaceutical compositions comprising said C/EBPα-saRNA and at least one pharmaceutically acceptable carrier. C/EBPα-saRNA modulates C/EBPα gene expression. In one embodiment, the expression of C/EBPα gene is increased by at least 20, 30, 40%, more preferably at least 45, 50, 55, 60, 65, 70, 75%, even more preferably at least 80% in the presence of the saRNA of the present invention compared to the expression of C/EBPα gene in the absence of the saRNA of the present invention. In a further preferable embodiment, the expression of C/EBPα gene is increased by a factor of at least 2, 3, 4, 5, 6, 7, 8, 9, 10, more preferably by a factor of at least 15, 20, 25, 30, 35, 40, 45, 50, even more preferably by a factor of at least 60, 70, 80, 90, 100, in the presence of the saRNA of the present invention compared to the expression of C/EBPα gene in the absence of the saRNA of the present invention.

### Metabolics Regulation

[0218] Hepatocytes are generally perceived as being important for maintenance of several vital functions. For example, they can regulate carbohydrate and lipid metabolism and detoxification of exogenous and endogenous compounds. C/EBPα is expressed in a variety of tissues where it plays an important role in the differentiation of many cell types including adipocytes, type II alveolar cells and hepatocytes. In the mouse, C/EBPα is found most abundantly in fat, liver and lung tissues. The function role of C/EBPα includes, but not limited to, regulation of alpha-1-antitrypsin, transthyretin and albumin. Furthermore, expression of C/EBPα gene in the liver cell line (HepG2) results in increased levels of cytochrome P450 (CYP), a superfamily of monooxygenases that participates in the metabolism of endogenous substrates and plays a key role in detoxification and metabolic activation of key xenobiotics [Jover et al., FEBS Letters, vol. 431(2), 227-230 (1998), the contents of which are incorporated herein by reference in their entirety].

[0219] Non-alcoholic fatty liver disease (NAFLD) is a major global health concern and affects 1 in 3 people in the United States. NAFLD is the build-up of extra fat (lipid) in liver cells that is not caused by excessive alcohol use. It is called a fatty liver (steatosis) if more than 5%-10% of the liver's weight is fat. NAFLD may progress to steatoheptitis, cirrhosis, and liver cancer. It is associated with metabolic disorders, such as metabolic syndrome, insulin resistance, type II diabetes, hyperlipidemia, hypertension, obesity, etc. Treatment methods include lowering low-density lipoprotein (LDL) cholesterol levels, improving insulin sensitivity, treating metabolic risk factors, weight loss and so on. [Adams et al., Postgraduate Medical Journal, vol. 82, 315-322 (2006); Musso et al., Curr. Opin. Lipidol., vol. 22(6), 489-496 (2011), the contents of which are incorporated herein by reference in their entirety]

[0220] C/EBPα protein plays an important role in regulating liver function and metabolics. The primary effects of C/EBPα on the liver are shown in FIG. 1, including decreasing fatty acid uptake by lowering CD36 protein level, decreasing de novo lipogenesis by lowering sterol regulatory element-binding proteins (SREBP), carbohydrate-responsive element-binding protein (ChREBP) and fatty acid synthase (FAS) protein levels, increasing β-oxidation by increasing peroxisome proliferator-activated receptor alpha (PPARα) and peroxisome proliferator-activated receptor gamma coactivator 1-alpha & -beta (PGC-1α & β) protein levels, decreasing hepatic lipid overload by lowering apolipoprotein C-III (APOC3) and low density lipoprotein receptor (LDLR) protein levels, decreasing progression to fibrosis by increasing PGC-1β protein level, and decreasing insulin resistance by increasing peroxisome proliferator-activated receptor gamma (PPARγ) protein level. Furthermore, C/EBPα has secondary effects on adipose tissues as shown in FIG. 2. White adipose tissue (WAT) is not only a lipogenic and fat storage tissue but also an important endocrine organ that regulates energy homeostasis, lipid metabolism, appetite, fertility, and immune and stress responses. Brown adipose tissue (BAT) contains numerous smaller lipid droplets and a much higher number of iron-containing mitochondria compared with WAT. It plays a significant role in nutritional energetics, energy balance and body weight. There is evidence that the atrophy of BAT is related to obesity. In particular, studies have indicated that impaired thermogenesis in BAT is important in the aetiology of obesity in rodents [Trayhurn P., J. Biosci., vol. 18(2), 161-173 (1993)]. C/EBPα decreases hepatic steatosis and insulin resistance and increases PGC-1α protein level, which may in turn cause browning of WAT, turn WAT into BAT, and then activate BAT, thereby reducing body fat and weight. Therefore, C/EBPα-saRNA of the present invention may be used to regulate liver function, reduce steatosis, reduce serum lipids, treat NAFLD, treat insulin resistance, increase energy expenditure, and treat obesity.

[0221] In one embodiment, provided is a method of regulating liver metabolism genes in vitro and in vivo by treatment of C/EBPα-saRNA of the present invention. Also provided is a method of regulating liver genes involved in NAFLD in vitro and in vivo by treatment of C/EBPα-saRNA of the present invention. The genes include, but are not limited to sterol regulatory element-binding factor 1 (SREBF-1 or SREBF), cluster of differentiation 36 (CD36), acetyl-CoA carboxylase 2 (ACACB), apolipoprotein C-III (APOC3), microsomal triglyceride transfer protein (MTP), peroxisome proliferator-activated receptor gamma coactivator 1 alpha (PPARγ-CoA1α or PPARGC1A), low density lipoprotein receptor (LDLR), peroxisome proliferator-activated receptor gamma coactivator 1 beta (PPARγ-CoA1β or PERC), peroxisome proliferator-activated receptor gamma (PPARγ), acetyl-CoA carboxylase 1 (ACACA), carbohydrate-responsive element-binding protein (ChREBP or MLX1PL), peroxisome proliferator-activated receptor alpha (PPARα or PPARA), FASN (fatty acid synthase), diglyceride acyltransferase-2 (DGAT2), and mammalian target of rapamycin (mTOR). In one embodiment, C/EBPα-saRNA decreases the expression of SREBF-1 gene in liver cells by at least 20%, 30%, preferably at least 40%. In one embodiment, C/EBPα-saRNA decreases the expression of CD36 gene in liver cells by at least 20%, 30%, 40%, 50%, preferably at least 75%, 90%. In one embodiment, C/EBPα-saRNA increases the expression of ACACB gene in liver cells by at least 20%, 30%, 40%, 50%, preferably at least 75%, 90%, 100%, 125%, 150%. In one embodiment, C/EBPα-saRNA decreases the expression of APOC3 gene in liver cells by at least 20%, 30%, 40%, 50%, preferably at least 75%, 90%. In one embodiment, C/EBPα-saRNA decreases the expression of MTP gene in liver cells by at least 20%, 30%, 40%, 50%, preferably at least 75%, 90%. In one embodiment, C/EBPα-saRNA increases the expression of PPARγ-CoA1α gene in liver cells by at least 20%, 30%, 40%, 50%, preferably at least 75%, 90%, 100%, 125%, 150%, more preferably at least 175%, 200%, 250%, 300%. In one embodiment, C/EBPα-saRNA increases the expression of PPARγ gene in liver cells by at least 20%, 30%, 40%, 50%, preferably at least 75%, 90%, 100%, 125%, 150%, more preferably at least 175%, 200%, 250%, 300%. In one embodiment, C/EBPα-saRNA increases the expression of PPARα gene in liver cells by at least 20%, 30%, 40%, 50%, preferably at least 75%, 90%, 100%, 125%, 150%, more preferably at least 175%, 200%, 250%, 300%. In one embodiment, C/EBPα-saRNA decreases the expression of MLXIPL gene in liver cells by at least 20%, 30%, 40%, 50%, preferably at least 75%. In one embodiment, C/EBPα-saRNA decreases the expression of FASN gene in liver cells by at least 20%, 30%, 40%, 50%, preferably at least 75%, 90%. In one embodiment, C/EBPα-saRNA decreases the expression of DGAT2 gene in liver cells by at least 10%, 20%, preferably at least 30%, 40%, 50%.

[0222] C/EBPα-saRNA also modulates the expression of liver metabolism genes disclosed above in BAT cells. In another embodiment, C/EBPα-saRNA decreases the expression of SREBP gene in BAT cells by at least 20%, 30%, preferably at least 40%. In one embodiment, C/EBPα-saRNA decreases the expression of CD36 gene in BAT cells by at least 20%, 30%, 40%, 50%, preferably at least 75%, 90%. In one embodiment, C/EBPα-saRNA decreases the expression of LDLR gene in BAT cells by at least 20%, 30%, 40%, 50%, preferably at least 75%, 90%. In one embodiment, C/EBPα-saRNA increases the expression of PPARGC1A gene in BAT cells by at least 20%, 30%, preferably at least 40%. In one embodiment, C/EBPα-saRNA decreases the expression of APOC gene in BAT cells by at least 20%, 30%, 40%, 50%, preferably at least 75%, 90%, more preferably at least 95%, 99%. In one embodiment, C/EBPα-saRNA decreases the expression of ACACB gene in BAT cells by at least 20%, 30%, 40%, 50%, preferably at least 75%. In one embodiment, C/EBPα-saRNA decreases the expression of PERC gene in BAT cells by at least 20%, 30%, 40%, 50%, preferably at least 75%. In one embodiment, C/EBPα-saRNA increases the expression of ACACA gene in BAT cells by at least 20%, 30%, 40%, 50%, preferably at least 75%, 90%, 100%, 125%, 150%. In one embodiment, C/EBPα-saRNA decreases the expression of MLXP1 gene in BAT cells by at least 20%, 30%, 40%, preferably at least 50%. In one embodiment, C/EBPα-saRNA decreases the expression of MTOR gene in BAT cells by at least 20%, 30%, 40%, preferably at least 50%, 75%. In one embodiment, C/EBPα-saRNA increases the expression of PPARA gene in BAT cells by at least 20%, 30%, 40%, 50%, preferably at least 75%, 90%, 100%, 125%, 150%, more preferably at least 200%, 250%, 300%, 350%, 400%. In one embodiment, C/EBPα-saRNA increases the expression of FASN gene in BAT cells by at least 20%, 30%, 40%, 50%, preferably at least 75%, 90%. In one embodiment, C/EBPα-saRNA increases the expression of DGAT gene in BAT cells by at least 20%, 30%, 40%, 50%, preferably at least 75%, 90%, 100%, 125%, 150%, more preferably at least 200%, 250%, 300%.

[0223] C/EBPα-saRNA also modulates the expression of liver metabolism genes disclosed above in WAT cells. In another embodiment, C/EBPα-saRNA decreases the expression of SREBP gene in WAT cells by at least 20%, 30%, preferably at least 40%. In one embodiment, C/EBPα-saRNA decreases the expression of CD36 gene in WAT cells by at least 20%, 30%, 40%, 50%, preferably at least 75%, 90%. In one embodiment, C/EBPα-saRNA decreases the expression of LDLR gene in WAT cells by at least 20%, 30%, 40%, 50%, preferably at least 75%, 90%. In one embodiment, C/EBPα-saRNA increases the expression of PPARGC1A gene in WAT cells by at least 20%, 30%, preferably at least 40%. In one embodiment, C/EBPα-saRNA increases the expression of MTP gene in WAT cells by at least 20%, 30%, 40%, 50%, preferably at least 75%, 90%, more preferably at least 95%, more preferably at least by a factor of 1.5, 2.0, 2.5, 3.0, 3.5, 4.0, more preferably by at least a factor of 5.0, 6.0, 7.0, 8.0, 9.0, 10.0. In one embodiment, In one embodiment, C/EBPα-saRNA increases the expression of APOC gene in WAT cells by at least 20%, 30%, 40%, 50%, preferably at least 75%, 90%, more preferably at least 95%, 99%. In one embodiment, C/EBPα-saRNA decreases the expression of ACACB gene in WAT cells by at least 20%, 30%, 40%, 50%, preferably at least 75%. In one embodiment, C/EBPα-saRNA decreases the expression of PERC gene in WAT cells by at least 20%, 30%, 40%, 50%, preferably at least 75%. In one embodiment, C/EBPα-saRNA decreases the expression of ACACA gene in WAT cells by at least 20%, 30%, 40%, 50%, preferably at least 75%, 90%, 95%. In one embodiment, C/EBPα-saRNA decreases the expression of MLX1PL gene in WAT cells by at least 20%, 30%, 40%, preferably at least 50%. In one embodiment, C/EBPα-saRNA decreases the expression of MTOR gene in WAT cells by at least 20%, 30%, 40%, preferably at least 50%, 75%. In one embodiment, C/EBPα-saRNA decreases the expression of FASN gene in WAT cells by at least 5%, 10%, preferably at least 15%, 20%. In one embodiment, C/EBPα-saRNA decreases the expression of DGAT gene in WAT cells by at least 10%, 20%, 30%, more preferably 40%, 50%.

[0224] In another embodiment, provided is a method of reducing insulin resistance (IR) or increasing insulin sensitivity by administering C/EBPα-saRNA of the present invention to a patient in need thereof. Also provided is a method of treating type II diabetes, hyperinsulinaemia and steatosis by administering C/EBPα-saRNA of the present invention to a patient in need thereof. If liver cells are resistance to insulin and cannot use insulin effectively, hyperglycemia develops. Subsequently, beta cells in pancreas increase their production of insulin leading to hyperinsulinemia and type II diabetes. Many regulators affect insulin resistance of liver cells. For example, sterol regulatory element-binding proteins 1 (SREBP1 or SREBP) is the master regulator of cholesterol and associated with increased insulin resistance. The up-regulation of cholesteryl ester transfer protein (CETP) is associated with increased insulin resistance. The up-regulation of hepatic fatty acid translocase/cluster of differentiation 36 (FAT/CD36) is associated with insulin resistance, hyperinsulinaemia, increased steatosis in patients with non-alcoholic steatohepatitis (NASH). Liver-specific overexpression of lipoprotein lipase gene (LPL) causes liver-specific insulin resistance. Liver X receptor gene (LXR) has a central role in insulin-mediated activation of sterol regulatory element-binding protein (SREBP)-1c-induced fatty acid synthesis in liver. Other factors include diglyceride acyltransferase-2 (DGAT2) that regulates triglyceride synthesis and fatty acid synthase (FASN) that regulates fatty acid biosynthesis. In one embodiment, C/EBPα-saRNA reduces the expression of FAT/CD36 gene in liver cells by at least 25%, preferably at least 50%, more preferably at least 75%, even more preferably 90% compared to liver cells with no treatment. In another embodiment, C/EBPα-saRNA increases the expression of LPL gene in liver cells by at least 20, 30, 40%, preferably at least 45, 50, 55, 60, 65, 70, 75, 80, 85, 90, 95%, more preferably at least 100, 150, 200, 250, 300, 350 and 400% compared to liver cells with no treatment. In another embodiment, C/EBPα-saRNA increases the expression of LXR gene in liver cells by at least 45, 50, 55, 60, 65, 70, 75, 80, 85, 90, 95%, more preferably at least 100, 150, 200, 250, 300, 350 and 400%, even more preferably at least 450, 500, 550, 600% compared to liver cells with no treatment. In another embodiment, C/EBPα-saRNA decreases SREBP1 gene expression. In another embodiment, C/EBPα-saRNA decreases DGAT2 gene expression. In another embodiment, C/EBPα-saRNA decreases CETP gene expression. In yet another embodiment, C/EBPα-saRNA decreases FASN gene expression.

[0225] A summary of NAFLD and IR genes that may be modulated with C/EBPα-saRNA is shown in Table 4. Abbreviations in Table 4: NAFLD: non-alcoholic fatty liver disease; IR: insulin resistance; DNL: de novo lipogenesis; FA: fatty acid; TG: triglycerides; LPL: lipoprotein lipase; HP: hepatic lipase; CHOL: cholesterol.

TABLE 4
NAFLD and IR genes that may be modulated with C/EBPα-saRNA

| | | Function/encoded products - | Deregulation | Deregulation |
|---|---|---|---|---|
| Gene name | Mechanism | References | in NAFLD | in IR |
| CD36 | FAs uptake | Scavenger receptor, free FAs | up | up |
| | | transporter in liver and adipose tissue; | | |
| | | regulates adipose tissue apoptosis and | | |
| | | inflammation | | |
| PPARγ | DNL | Activates genes involved in lipid | up | down |
| | | storage and metabolism; required for | | |
| | | lipid homeostasis; high expressed in | | |
| | | adipose tissue and very low in the | | |
| | | liver; implicated in adipocyte | | |
| | | differentiation and insulin sensitivity | | |
| PPARγ- | DNL | Transcriptional coactivator for | up | up |
| CoA 1β | | SREBP-1; enhances lipogenesis and | | |
| (PERC) | | VLDL synthesis; highly expressed in | | |
| | | brown fat and heart and induced in the | | |
| | | liver during fasting; master regulator | | |
| | | of mitochondrial biogenesis and | | |
| | | oxidative metabolism, lipogenesis, and | | |
| | | TG secretion | | |
| SREBP- | DNL | Transcription factor, induces genes | up | up |
| 1c | | involved in glucose utilization and FA | | |
| | | synthesis; major mediator of insulin | | |
| | | action on lipogenic genes; regulates | | |
| | | adipogenesis | | |
| ChREBP | DNL | Transcription factors activated by | up | up |
| (MLX1PL) | | glucose; induces glycolytic and | | |
| | | lipogenic genes; major deteminant of | | |
| | | adipose tissue fatty acid synthesis and | | |
| | | systemic insulin sensitivity | | |
| FAS | DNL | Enzyme that catalyzes the last step in | up | up |
| | | FA biosynthesis | | |
| ACACA | DNL | Enzyme that catalyzes the synthesis of | up | up |
| (ACC1) | | malonyl-CoA for the synthesis of FAs | | |
| | | in the cytosol | | |
| ACACB | β-oxidation | Enzyme that catalyzes the synthesis of | up | up |
| (ACC2) | | malonyl-CoA, which functions as | | |
| | | inhibitor of mitochondrial β-oxidation | | |
| PPARα | β-oxidation | Activates the genes involved in the | down | down |
| | | oxidation of FAs, major regulator of | | |
| | | lipid metabolism in the liver; | | |
| | | predominantly expressed in the liver; | | |
| | | involved in the regulation of glucose | | |
| | | homeostasis, insulin sensitivity, fat | | |
| | | accumulation, and adipose tissue | | |
| | | glucose use | | |
| PPARγ- | β-oxidation | Transcriptional co-activator that | down | down |
| CoA 1α | | regulates mitochondrial biology and | | |
| | | energy homeostasis; crucial role in | | |
| | | mitochondrial biogenesis; interacts | | |
| | | with PPARα to increase the | | |
| | | mitochondrial β-oxidation of FAs | | |
| DGAT2 | TG | Enzyme that catalyzes the final | up | up |
| | synthesis | reaction in the synthesis of TG | | |
| APOC3 | TG | Protein that inhibits LPL and HP; | up | up |
| | concentration | involved in the regulation of plasma | | |
| | | TG concentrations; pro-steatosic | | |
| LDLR | CHOL | Low-density lipoprotein receptor; | down | no change |
| | concentration | critical role in regulating blood CHOL | | |
| | | levels; abundant in the liver, which is | | |
| | | the organ responsible for removing | | |
| | | most excess CHOL from the body | | |
| MTP | Lipoprotein | Carrier of TG; central role in VLDL | down | no change |
| (MTTP1) | assembly | assembly; prevalently expressed in the | | |
| | | liver | | |
| mTOR | Adipose | Possible regulator of adipose tissue | up | up |
| | mass | mass; central role in lipolysis, | | |
| | | lipogenesis, and adipogenesis | | |
| | Effects of Ezetimibe | Effects of C/EBPα | | |
| Gene name | in the liver | Liver | WAT | BAT |
| CD36 | minor down | down | down | down |
| PPARγ | up | up | no change | no change |
| PPARγ-CoA | up | up | down | up |
| 1β (PERC) | | | | |
| SREBP-1c | up | down | down | down |
| ChREBP | up | down | up | up |
| (MLX1PL) | | | | |
| FAS | down | down | minor up | up |
| ACACA | minor up | no change | down | up |
| (ACC1) | | | | |
| ACACB | up | up | down | down |
| (ACC2) | | | | |
| PPARα | up | up | down | up |
| PPARγ-CoA | up | up | up | up |
| 1α | | | | |
| DGAT2 | minor down | minor down | down | up |
| APOC3 | down | down | up | down |
| LDLR | minor down | down | up | minor down |
| MTP | up | down | up | down |
| (MTTP1) | | | | |
| mTOR | no change | no change | down | down |

[0226] In one embodiment of the present invention, provided is a method of lowering serum cholesterol level in vitro by treatment of C/EBPα-saRNA of the present invention. The serum cholesterol level with C/EBPα-saRNA reduces at least 25%, preferably 50%, more preferably 75% compared to serum cholesterol level with no treatment. Also provided is a method of lowering LDL and triglyceride levels in hepatocyte cells and increasing circulating levels of LDL in vivo by administering C/EBPα-saRNA of the present invention. The circulation LDL level may increase at least by a factor of 2, preferably by a factor of 3, preferably by a factor of 4, preferably by a factor of 5, preferably by a factor of 10, and preferably by a factor of 15 compared to circulating LDL level in the absence of C/EBPα-saRNA. The liver triglyceride level may be reduced by at least 10%, 20%, 30%, 40%, 50%, 60%, or 70% compared to the liver triglyceride level in the absence of C/EBPα-saRNA. The liver LDL level may be reduced by at least 10%, 20%, 30%, 40%, 50%, 60%, or 70% compared to the liver LDL level in the absence of C/EBPα-saRNA.

[0227] In one embodiment of the present invention, provided is a method of treating NAFLD and reducing fatty liver size by administering C/EBPα-saRNA of the present invention to a patient in need thereof. The size of a fatty liver of a patient treated with C/EBPα-saRNA is reduced by at least 10%, 20%, 30%, 40%, or 50% compared with a patient without treatment. Also provided is a method of reducing body weight and treating obesity by administering C/EBPα-saRNA of the present invention to a patient in need thereof. The body weight of a patient treated with C/EBPα-saRNA is lower than the body weight of a patient without treatment of C/EBPα-saRNA by at least 10%, 20%, 30%, 40%, 50%, 60%, or 70%. C/EBPα-saRNA of the present invention may be administered in a dose, 2 doses, 3 does or more. Also provided is a method of decreasing hepatic uptake of free fatty acids by treatment of C/EBPα-saRNA of the present invention. Also provided is a method of reducing white adipose tissue (WAT) inflammation by treatment of C/EBPα-saRNA of the present invention. Also provided is a method of reducing de novo lipogenesis by treatment of C/EBPα-saRNA of the present invention. Also provided is a method of increasing beta-oxidation in the liver by treatment of C/EBPα-saRNA of the present invention. Also provided is a method of increasing brown adipose tissue (BAT) in the liver by treatment of C/EBPα-saRNA of the present invention. Also provided is a method of reducing hepatic lipid uptake by treatment of C/EBPα-saRNA of the present invention. Also provided is a method of decreasing lipogenesis in WAT by treatment of C/EBPα-saRNA of the present invention. Also provided is a method of decreasing lipid storage in liver by treatment of C/EBPα-saRNA of the present invention. Also provided is a method of reducing lipid overload in the liver by treatment of C/EBPα-saRNA of the present invention.

[0228] In another embodiment, C/EBPα-saRNA of the present invention is used to increase liver function. In one non-limiting example, C/EBPα-saRNA increases albumin gene expression and thereby increasing serum albumin and unconjugated bilirubin levels. The expression of albumin gene may be increased by at least 20, 30, 40%, more preferably at least 45, 50, 55, 60, 65, 70, 75%, even more preferably at least 80% in the presence of the saRNA of the present invention compared to the expression of albumin gene in the absence of the saRNA of the present invention. In a further preferable embodiment, the expression of albumin gene is increased by a factor of at least 2, 3, 4, 5, 6, 7, 8, 9, 10, more preferably by a factor of at least 15, 20, 25, 30, 35, 40, 45, 50, even more preferably by a factor of at least 60, 70, 80, 90, 100, in the presence of the saRNA of the present invention compared to the expression of albumin gene in the absence of the saRNA of the present invention. In another non-limiting example, C/EBPα-saRNA decreases the amount of alanine transaminase (ALT), aspartate aminotransferase (AST), gamma glutamyl transpeptidase (GGT), alphafectoprotein (AFP) and hepatocyte growth factor (HGF). The amount of ALT, AST, GGT, AFP, or HGF may be decreased by at least 20, 30, 40%, more preferably at least 45, 50, 55, 60, 65, 70, 75%, even more preferably at least 80% in the presence of the saRNA of the present invention compared to the amount of any of ALT, AST, GGT, AFP, or HGF in the absence of the saRNA of the present invention.

[0229] In another embodiment, C/EBPα-saRNA of the present invention is administered to regulate the levels of other members of the C/EBP family. C/EBPα-saRNA increases the expression of C/EBPβ, C/EBPγ, C/EBPδ and C/EBPζ depending on the dose of C/EBPα-saRNA. In yet another embodiment, the ratio of C/EBPα or C/EBPβ protein isoforms in a cell is regulated by contacting said cell with C/EBPα-saRNA of the present invention. In one embodiment, the 42 KDa isoform of C/EBPα is increased. In one embodiment, the 30 kDa isoform of C/EBPβ is increased.

ecCEBPA

[0230] Extra coding CEBPA (ecCEBPA), a functional ncRNA transcribed from the CEBPA locus, regulates CEBPA methylation by interacting with DNA methyltransferase (DNMT1) thus preventing CEBPA gene methylation. It has been found that ecCEBPA knockdown led to a decrease of CEBPA mRNA expression and to a significant increase in DNA methylation (Ruscio et al., Nature, vol. 503:371-376 (2013), the contents of which are incorporated herein by reference in their entirety). In another embodiment, C/EBPα-saRNA of the present invention is used to upregulate ecCEBPA levels.

### Surgical Care

[0231] Hepatectomy, surgical resection of the liver or hepatic tissue might cause liver failure, reduced production of albumin and coagulation factors. Proper surgical care after hepatectomy is needed. In some embodiments, C/EBPα-saRNA of the present invention is used for surgical care after hepatectomy to promote liver regeneration and increase survival rate.

### Hyperproliferation Disorders

[0232] In one embodiment of the invention, C/EBPα-saRNA of the present invention is used to reduce cell proliferation of hyperproliferative cells. Examples of hyperproliferative cells include cancerous cells, e.g., carcinomas, sarcomas, lymphomas and blastomas. Such cancerous cells may be benign or malignant. Hyperproliferative cells may result from an autoimmune condition such as rheumatoid arthritis, inflammatory bowel disease, or psoriasis. Hyperproliferative cells may also result within patients with an oversensitive immune system coming into contact with an allergen. Such conditions involving an oversensitive immune system include, but are not limited to, asthma, allergic rhinitis, eczema, and allergic reactions, such as allergic anaphylaxis. In one embodiment, tumor cell development and/or growth is inhibited. In a preferred embodiment, solid tumor cell proliferation is inhibited. In another preferred embodiment, metastasis of tumor cells is prevented. In another preferred example, undifferentiated tumor cell proliferation is inhibited.

[0233] Inhibition of cell proliferation or reducing proliferation means that proliferation is reduced or stops altogether. Thus, “reducing proliferation” is an embodiment of “inhibiting proliferation”. Proliferation of a cell is reduced by at least 20%, 30% or 40%, or preferably at least 45, 50, 55, 60, 65, 70 or 75%, even more preferably at least 80, 90 or 95% in the presence of the saRNA of the invention compared to the proliferation of said cell prior to treatment with the saRNA of the invention, or compared to the proliferation of an equivalent untreated cell. In embodiments wherein cell proliferation is inhibited in hyperproliferative cells, the “equivalent” cell is also a hyperproliferative cell. In preferred embodiments, proliferation is reduced to a rate comparable to the proliferative rate of the equivalent healthy (non-hyperproliferative) cell. Alternatively viewed, a preferred embodiment of “inhibiting cell proliferation” is the inhibition of hyperproliferation or modulating cell proliferation to reach a normal, healthy level of proliferation.

[0234] In one non-limiting example, C/EBPα-saRNA is used to reduce the proliferation of leukemia and lymphoma cells. Preferably, the cells include Jurkat cells (acute T cell lymphoma cell line), K562 cells (erythroleukemia cell line), U373 cells (glioblastoma cell line), and 32Dp210 cells (myeloid leukemia cell line).

[0235] In another non-limiting example, C/EBPα-saRNA is used to reduce the proliferation of ovarian cancer cells, liver cancer cells, pancreatic cancer cells, breast cancer cells, prostate cancer cells, rat liver cancer cells, and insulinoma cells. Preferably, the cells include PEO1 and PEO4 (ovarian cancer cell line), HepG2 (hepatocellular carcinoma cell line), Panc1 (human pancreatic carcinoma cell line), MCF7 (human breast adenocarcinoma cell line), DU145 (human metastatic prostate cancer cell line), rat liver cancer cells, and MIN6 (rat insulinoma cell line).

[0236] In another non-limiting example, C/EBPα-saRNA is used in combination with a siRNA targeting C/EBPβ gene to reduce tumor cell proliferation. Tumor cell may include hepatocellular carcinoma cells such as HepG2 cells and breast cancer cells such as MCF7 cells.

[0237] In one embodiment, the saRNA of the present invention is used to treat hyperproliferative disorders. Tumors and cancers represent a hyperproliferative disorder of particular interest, and all types of tumors and cancers, e.g. solid tumors and haematological cancers are included. Examples of cancer include, but not limited to, cervical cancer, uterine cancer, ovarian cancer, kidney cancer, gallbladder cancer, liver cancer, head and neck cancer, squamous cell carcinoma, gastrointestinal cancer, breast cancer, prostate cancer, testicular cancer, lung cancer, non-small cell lung cancer, non-Hodgkin's lymphoma, multiple myeloma, leukemia (such as acute lymphocytic leukemia, chronic lymphocytic leukemia, acute myelogenous leukemia, and chronic myelogenous leukemia), brain cancer (e.g. astrocytoma, glioblastoma, medulloblastoma), neuroblastoma, sarcomas, colon cancer, rectum cancer, stomach cancer, anal cancer, bladder cancer, endometrial cancer, plasmacytoma, lymphomas, retinoblastoma, Wilm's tumor, Ewing sarcoma, melanoma and other skin cancers. The liver cancer may include, but not limited to, cholangiocarcinoma, hepatoblastoma, haemangiosarcoma, or hepatocellular carcinoma (HCC). HCC is of particular interest.

[0238] Primary liver cancer is the fifth most frequent cancer worldwide and the third most common cause of cancer-related mortality. HCC represents the vast majority of primary liver cancers [El-Serag et al., Gastroenterology, vol. 132(7), 2557-2576 (2007), the contents of which are disclosed herein in their entirety]. HCC is influenced by the interaction of several factors involving cancer cell biology, immune system, and different aetiologies (viral, toxic and generic). The majority of patients with HCC develop malignant tumors from a background of liver cirrhosis. Currently most patients are diagnosed at an advanced stage and therefore the 5 year survival for the majority of HCC patients remains dismal. Surgical resection, loco-regional ablation and liver transplantation are currently the only therapeutic options which have the potential to cure HCC. However, based on the evaluation of individual liver function and tumor burden only about 5-15% of patients are eligible for surgical intervention. The binding sites for the family of C/EBP transcription factors are present in the promoter regions of numerous genes that are involved in the maintenance of normal hepatocyte function and response to injury (including albumin, interleukin 6 response, energy homeostasis, omithine cycle regulation and serum amyloid A expression). The present invention utilizes C/EBPα-saRNA to modulate the expression of C/EBPα gene and treat liver cirrhosis and HCC.

[0239] The method of the present invention may reduce tumor volume by at least 10, 20, 30, 40, 50, 60, 70, 80 or 90%. Preferably, the development of one or more new tumors is inhibited, e.g. a subject treated according to the invention develops fewer and/or smaller tumors. Fewer tumors means that he develops a smaller number of tumors than an equivalent subject over a set period of time. For example, he develops at least 1, 2, 3, 4 or 5 fewer tumors than an equivalent control (untreated) subject. Smaller tumor means that the tumors are at least 10, 20, 30, 40, 50, 60, 70, 80 or 90% smaller in weight and/or volume than tumors of an equivalent subject. The method of the present invention reduces tumor burden by at least 10, 20, 30, 40, 50, 60, 70, 80 or 90%.

[0240] The set period of time may be any suitable period, e.g. 1, 2, 3, 4, 5, 6, 7, 8, 9 or 10 months or years.

[0241] In one non-limiting example, provided is a method of treating an undifferentiated tumor, comprising contacting a cell, tissue, organ or subject with C/EBPα-saRNA of the present invention. Undifferentiated tumors generally have a poorer prognosis compared to differentiated ones. As the degree of differentiation in tumors has a bearing on prognosis, it is hypothesized that the use of a differentiating biological agent could be a beneficial anti-proliferative drug. C/EBPα is known to restore myeloid differentiation and prevent hyperproliferation of hematopoietic cells in acute myeloid leukemia. Preferably, undifferentiated tumors that may be treated with C/EBPα-saRNA include undifferentiated small cell lung carcinomas, undifferentiated pancreatic adenocarcinomas, undifferentiated human pancreatic carcinoma, undifferentiated human metastatic prostate cancer, and undifferentiated human breast cancer.

[0242] In one non-limiting example, C/EBPα-saRNA is complexed into PAMAM dendrimer, referred to as C/EBPα-saRNA-dendrimer for targeted in vivo delivery. The therapeutic effect of intravenously injected C/EBPα-saRNA-dendrimers is demonstrated in a clinically relevant rat liver tumor model as shown in Example 1. After three doses through tail vein injection at 48 hour intervals, the treated cirrhotic rats showed significantly increased serum albumin levels within one week. The liver tumor burden was significantly decreased in the C/EBPα-saRNA dendrimer treated groups. This study demonstrates, for the first time, that gene targeting by small activating RNA molecules can be used by systemic intravenous administration to simultaneously ameliorate liver function and reduce tumor burden in cirrhotic rats with HCC.

[0243] In one embodiment, C/EBPα-saRNA is used to regulate oncogenes and tumor suppressor genes. Preferably, the expression of the oncogenes may be down-regulated. The expression of the oncogenes reduces by at least 20, 30, 40%, more preferably at least 45, 50, 55, 60, 65, 70, 75, 80, 85, 90, 95% in the presence of C/EBPα-saRNA of the invention compared to the expression in the absence of C/EBPα-saRNA of the invention. In a further preferable embodiment, the expression of the oncogenes is reduced by a factor of at least 2, 3, 4, 5, 6, 7, 8, 9, 10, more preferably by a factor of at least 15, 20, 25, 30, 35, 40, 45, 50, even more preferably by a factor of at least 60, 70, 80, 90, 100, in the presence of C/EBPα-saRNA of the invention compared to the expression in the absence of C/EBPα-saRNA of the invention. Preferably, the expressions of tumor suppressor genes may be inhibited. The expression of the tumor suppressor genes increase by at least 20, 30, 40%, more preferably at least 45, 50, 55, 60, 65, 70, 75, 80, 85, 90, 95%, even more preferably at least 100% in the presence of C/EBPα-saRNA of the invention compared to the expression in the absence of C/EBPα-saRNA of the invention. In a further preferable embodiment, the expression of tumor suppressor genes is increased by a factor of at least 2, 3, 4, 5, 6, 7, 8, 9, 10, more preferably by a factor of at least 15, 20, 25, 30, 35, 40, 45, 50, even more preferably by a factor of at least 60, 70, 80, 90, 100 in the presence of C/EBPα-saRNA of the invention compared to the expression in the absence of C/EBPα-saRNA of the invention. Non-limiting examples of oncogenes and tumor suppressor genes include Bcl-2-associated X protein (BAX), BH3 interacting domain death agonist (BID), caspase 8 (CASP8), disabled homolog 2-interacting protein (DAB21P), deleted in liver cancer 1 (DLC1), Fas surface death receptor (FAS), fragile histidine triad (FHIT), growth arrest and DNA-damage-inducible-beta (GADD45B), hedgehog interacting protein (HHIP), insulin-like growth factor 2 (IGF2), lymphoid enhancer-binding factor 1 (LEF1), phosphatase and tensin homolog (PTEN), protein tyrosine kinase 2 (PTK2), retinoblastoma 1 (RB1), runt-related transcription factor 3 (RUNX3), SMAD family member 4 (SMAD4), suppressor of cytokine signaling (3SOCS3), transforming growth factor, beta receptor II (TGFBR2), tumor necrosis factor (ligand) superfamily, member 10 (TNFSF10), P53, disintegrin and metalloproteinase domain-containing protein 17 (ADAM17), v-akt murine thymoma viral oncogene homolog 1 (AKT1), angiopoietin 2 (ANGPT2), B-cell CLL/lymphoma 2 (BCL2), BCL2-like 1 (BCL2L1), baculoviral IAP repeat containing 2 (BIRC2), baculoviral IAP repeat containing 5 (BIRC5), chemokine (C-C motif) ligand 5 (CCL5), cyclin D1 (CCND1), cyclin D2 (CCND2), cadherin 1 (CDH1), cadherin 13 (CDH13), cyclin-dependent kinase inhibitor 1A (CDKN1A), cyclin-dependent kinase inhibitor 1B (CDKN1B), cyclin-dependent kinase inhibitor 2A (CDKN2A), CASP8 and FADD-like apoptosis regulator (CFLAR), catenin (cadherin-associated protein) beta 1 (CTNNB1), chemokine receptor 4 (CXCR4), E2F transcription factor 1 (E2F1), epidermal growth factor (EGF), epidermal growth factor receptor (EGFR), E1A binding protein p300 (EP300), Fas (TNFRSF6)-associated via death domain (FADD), fms-related tyrosine kinase 1 (FLT1), frizzled family receptor 7 (FZD7), glutathione S-transferase pi 1 (GSTP1), hepatocyte growth factor (HGF), Harvey rat sarcoma viral oncogene homolog (HRAS), insulin-like growth factor binding protein 1 (IGFBP1), insulin-like growth factor binding protein 3 (IGFBP3), insulin receptor substrate 1 (IRS1), integrin beta 1 (ITGB1), kinase insert domain receptor (KDR), myeloid cell leukemia sequence 1 (MCL1), met proto-oncogene (MET), mutS homolog 2 (MSH2), mutS homolog 3 (MSH3), metadherin (MTDH), v-myc avian myelocytomatosis viral oncogene homolog (MYC), nuclear factor of kappa light polypeptide gene enhancer in B-cells 1 (NFKB1), neuroblastoma RAS viral (v-ras) oncogene homolog (NRAS), opioid binding protein/cell adhesion molecule-like (OPCML), platelet-derived growth factor receptor, alpha polypeptide (PDGFRA), peptidylprolyl cis/trans isomerase, NIMA-interacting 1 (PIN1), prostaglandin-endoperoxide synthase 2 (PTGS2), PYD and CARD domain containing (PYCARD), ras-related C3 botulinum toxin substrate 1 (RAC1), Ras association (RalGDS/AF-6) domain family member 1 (RASSF1), reelin (RELN), ras homolog family member A (RHOA), secreted frizzled-related protein 2 (SFRP2), SMAD family member 7 (SMAD7), suppressor of cytokine signaling 1 (SOCS1), signal transducer and activator of transcription 3 (STAT3), transcription factor 4 (TCF4), telomerase reverse transcriptase (TERT), transforming growth factor alpha (TGFA), transforming growth factor beta 1 (TGFB1), toll-like receptor 4 (TLR4), tumor necrosis factor receptor superfamily member 10b (TNFRSF10B), vascular endothelial growth factor A (VEGFA), Wilms tumor 1 (WT1), X-linked inhibitor of apoptosis (XIAP), and Yes-associated protein 1 (YAP1).

[0244] In one embodiment, provided is a method of increasing white blood cell count by administering C/EBPα-saRNA of the present invention to a patient in need thereof. Also provided is a method of treating leukopenia for patients having sepsis or chronic inflammation diseases (e.g., hepatitis and liver cirrhosis) and for immunocompromised patients (e.g., patients undergoing chemotherapy) by administering C/EBPα-saRNA of the present invention to said patient. Also provided is a method of treating pre B cell and B cell malignancies including leukaemia and lymphoma by administering C/EBPα-saRNA of the present invention to a patient in need thereof. Also provided is a method of mobilize white blood cells, haematopoietic or mesenchymal stem cells by administering C/EBPα-saRNA of the present invention to a patient in need thereof. In one embodiment, the white blood cell count in a patient treated with C/EBPα-saRNA is increased by at least 50%, 75%, 100%, more preferably by at least a factor of 1.5, 2, 2.5, 3, 3.5, 4, 4.5, 5, more preferably by at least a factor of 6, 7, 8, 9, 10 compared to no C/EBPα-saRNA treatment.

[0245] In one embodiment, C/EBPα-saRNA is used to regulate micro RNAs (miRNA or miR) in the treatment of hepatocellular carcinoma. MicroRNAs are small non-coding RNAs that regulate gene expression. They are implicated in important physiological functions and they may be involved in every single step of carcinogenesis. They typically have 21 nucleotides and regulate gene expression at the post transcriptional level via blockage of mRNA translation or induction of mRNA degradation by binding to the 3′-untranslated regions (3′-UTR) of said mRNA.

[0246] In tumors, regulation of miRNA expression affects tumor development. In HCC, as in other cancers, miRNAs function either as oncogenes or tumor suppressor genes influencing cell growth and proliferation, cell metabolism and differentiation, apoptosis, angiogenesis, metastasis and eventually prognosis. [Lin et al., Biochemical and Biophysical Research Communications, vol. 375, 315-320 (2008); Kutay et al., J. Cell. Biochem., vol. 99, 671-678 (2006); Meng et al., Gastroenterology, vol. 133(2), 647-658 (2007), the contents of each of which are incorporated herein by reference in their entirety] C/EBPα-saRNA of the present invention modulates C/EBPα gene expression and/or function and also regulates miRNA levels in HCC cells. Non-limiting examples of miRNAs that may be regulated by C/EBPα-saRNA of the present invention include hsa-let-7a-5p, hsa-miR-133b, hsa-miR-122-5p, hsa-miR-335-5p, hsa-miR-196a-5p, hsa-miR-142-5p, hsa-miR-96-5p, hsa-miR-184, hsa-miR-214-3p, hsa-miR-15a-5p, hsa-let-7b-5p, hsa-miR-205-5p, hsa-miR-181a-5p, hsa-miR-140-5p, hsa-miR-146b-5p, hsa-miR-34c-5p, hsa-miR-134, hsa-let-7g-5p, hsa-let-7c, hsa-miR-218-5p, hsa-miR-206, hsa-miR-124-3p, hsa-miR-100-5p, hsa-miR-10b-5p, hsa-miR-155-5p, hsa-miR-1, hsa-miR-150-5p, hsa-let-7i-5p, hsa-miR-27b-3p, hsa-miR-127-5p, hsa-miR-191-5p, hsa-let-7f-5p, hsa-miR-10a-5p, hsa-miR-15b-5p, hsa-miR-16-5p, hsa-miR-34a-5p, hsa-miR-144-3p, hsa-miR-128, hsa-miR-215, hsa-miR-193a-5p, hsa-miR-23b-3p, hsa-miR-203a, hsa-miR-30c-5p, hsa-let-7e-5p, hsa-miR-146a-5p, hsa-let-7d-5p, hsa-miR-9-5p, hsa-miR-181b-5p, hsa-miR-181c-5p, hsa-miR-20b-5p, hsa-miR-125a-5p, hsa-miR-148b-3p, hsa-miR-92a-3p, hsa-miR-378a-3p, hsa-miR-130a-3p, hsa-miR-20a-5p, hsa-miR-132-3p, hsa-miR-193b-3p, hsa-miR-183-5p, hsa-miR-148a-3p, hsa-miR-138-5p, hsa-miR-373-3p, hsa-miR-29b-3p, hsa-miR-135b-5p, hsa-miR-21-5p, hsa-miR-181d, hsa-miR-301a-3p, hsa-miR-200c-3p, hsa-miR-7-5p, hsa-miR-29a-3p, hsa-miR-210, hsa-miR-17-5p, hsa-miR-98-5p, hsa-miR-25-3p, hsa-miR-143-3p, hsa-miR-19a-3p, hsa-miR-18a-5p, hsa-miR-125b-5p, hsa-miR-126-3p, hsa-miR-27a-3p, hsa-miR-372, hsa-miR-149-5p, and hsa-miR-32-5p.

[0247] In one non-limiting example, the miRNAs are oncogenic miRNAs and are downregulated by a factor of at least 0.01, 0.02, 0.05, 0.1, 0.2, 0.3, 0.5, 1, 1.5, 2, 2.5, and 3, in the presence of C/EBPα-saRNA of the invention compared to in the absence of C/EBPα-saRNA. In another non-limiting example, the miRNAs are tumor suppressing miRNAs and are upregulated by a factor of at least 0.01, 0.02, 0.05, 0.1, 0.2, 0.3, 0.5, 1, more preferably by a factor of at least 2, 3, 4, 5, 6, 7, 8, 9, 10, more preferably by a factor of at least 15, 20, 25, 30, 35, 40, 45, 50, even more preferably by a factor of at least 60, 70, 80, 90, 100, in the presence of C/EBPα-saRNA of the invention compared to in the absence of C/EBPα-saRNA.

### Stem Cell Regulation

[0248] In some embodiments of the present invention, C/EBPα-saRNA is used to regulate self-renewal pluripotency factors and affect stem cell differentiation. Altering the phenotype of cells in order to express a protein of interest or to change a cell to a different cell phenotype has been used in different clinical, therapeutic and research settings. Altering a phenotype of a cell is currently accomplished by expressing protein from DNA or viral vectors. Currently there are studies being done to evaluate the use of human embryonic stem cells as a treatment option for various diseases such as Parkinson's disease and diabetes and injuries such as a spinal cord injury. Embryonic stem cells have the ability to grow indefinitely while maintaining Pluripotency to generate any differentiated cell type.

[0249] Many factors such as pluripotency factors, cell phenotype altering factors, transdifferentiation factors, differentiation factors and dedifferentiation factors, are utilized to alter cell phenotype, which is useful in the field of personal regenerative medicine, cell therapy and therapies for other diseases. For example, the self-renewal and pluripotency properties of stem cells are regulated by an array of genes, such as transcription factors and chromatin remodeling enzymes, in a core regulatory circuitry including OCT4, SOX2, NANOG, and KLF genes [Bourillot et al., BMC Biology, 8:125 (2010), the contents of which are incorporated herein by reference in their entirety]. This regulatory circuitry for self-regulatory networks also affects downstream genes. Oligonucleotides have been utilized to regulate the core regulatory circuitry. Xu et al. disclosed that miRNA-145 targets the 3′-UTR of OCT4, SOX2, and KLF4. Reducing miRNA-145 impairs differentiation and elevates OCT4, SOX2, and KLF4. [Xu et al., Cell, vol. 137, 1-12 (2009), the contents of which are incorporated herein by reference in their entirety]

[0250] In one embodiment, C/EBPα-saRNA of the present invention is used to regulate self-renewal pluripotency genes. Non-limiting examples of pluripotency genes include SOX2, OCT4, cKit, KLF4, KLF2, KLF5, NANOG, CDX2, and SALL4. In one embodiment, the expression of the pluripotency gene is reduced by at least 20%, 30% or 40%, or preferably at least 45, 50, 55, 60, 65, 70 or 75%, even more preferably at least 80, 90 or 95%, in the presence of C/EBPα-saRNA of the invention compared to in the absence of C/EBPα-saRNA. In another embodiment, the expression of the pluripotency gene is increased by at least 20, 30, 40%, more preferably at least 45, 50, 55, 60, 65, 70, 75%, even more preferably at least 80%, in the presence of C/EBPα-saRNA of the invention compared to in the absence of C/EBPα-saRNA. In a preferable embodiment, the expression of the pluripotency gene is increased by a factor of at least 2, 3, 4, 5, 6, 7, 8, 9, 10, more preferably by a factor of at least 15, 20, 25, 30, 35, 40, 45, 50, even more preferably by a factor of at least 60, 70, 80, 90, 100, in the presence of C/EBPα-saRNA of the invention compared to the expression in the absence of C/EBPα-saRNA.

[0251] In one embodiment, C/EBPα-saRNA is used to regulate epithelial-mesenchymal transition (EMT) of a cell. Some tumors contain cancer stem cells or cancer stem-like cells that can self-renew and maintain tumor-initiating capacity through differentiation into a different lineage of cancer cells. It has been demonstrated that EMT is associated with cancer stem-like cells, tumor aggressiveness and metastasis, and tumor recurrence. [Kong et al., Cancers, vol. 3(1), 716-729 (2011)] There are many factors that regulate EMT, including miRNAs such as miR-200 and miR-134, growth factors such as fibroblast growth factor (FGF), epidermal growth factor (EGF), platelet-derived growth factor (PDGF), as well as factors such as Notch-1 and Wnt signaling pathway. In one non-limiting example, C/EBPα-saRNA regulates EMT by modulating the expression of miR-134. In another non-limiting example, C/EBPα-saRNA regulates EMT by modulating the expression of RUNX3, CTNB1, HGF, SMAD7 or TGFB1 genes.

### III. Kits and Devices

### Kits

[0252] The invention provides a variety of kits for conveniently and/or effectively carrying out methods of the present invention. Typically kits will comprise sufficient amounts and/or numbers of components to allow a user to perform multiple treatments of a subject(s) and/or to perform multiple experiments.

[0253] In one embodiment, the present invention provides kits for regulate the expression of genes in vitro or in vivo, comprising C/EBPα-saRNA of the present invention or a combination of C/EBPα-saRNA, saRNA modulating other genes, siRNAs, or miRNAs. The kit may further comprise packaging and instructions and/or a delivery agent to form a formulation composition. The delivery agent may comprise a saline, a buffered solution, a lipidoid, a dendrimer or any delivery agent disclosed herein. Non-limiting examples of genes include C/EBPα, other members of C/EBP family, albumin gene, alphafectoprotein gene, liver specific factor genes, growth factors, nuclear factor genes, tumor suppressing genes, pluripotency factor genes.

[0254] In one non-limiting example, the buffer solution may include sodium chloride, calcium chloride, phosphate and/or EDTA. In another non-limiting example, the buffer solution may include, but is not limited to, saline, saline with 2 mM calcium, 5% sucrose, 5% sucrose with 2 mM calcium, 5% Mannitol, 5% Mannitol with 2 mM calcium, Ringer's lactate, sodium chloride, sodium chloride with 2 mM calcium and mannose (See U.S. Pub. No. 20120258046; herein incorporated by reference in its entirety). In yet another non-limiting example, the buffer solutions may be precipitated or it may be lyophilized. The amount of each component may be varied to enable consistent, reproducible higher concentration saline or simple buffer formulations. The components may also be varied in order to increase the stability of saRNA in the buffer solution over a period of time and/or under a variety of conditions.

[0255] In another embodiment, the present invention provides kits to regulate the proliferation of cells, comprising C/EBPα-saRNA of the present invention, provided in an amount effective to inhibit the proliferation of cells when introduced into said cells; optionally siRNAs and miRNAs to further regulate the proliferation of target cells; and packaging and instructions and/or a delivery agent to form a formulation composition.

[0256] In another embodiment, the present invention provides kits for reducing LDL levels in cells, comprising saRNA molecules of the present invention; optionally LDL reducing drugs; and packaging and instructions and/or a delivery agent to form a formulation composition.

[0257] In another embodiment, the present invention provides kits for regulating miRNA expression levels in cells, comprising C/EBPα-saRNA of the present invention; optionally siRNAs, eRNAs and lncRNAs; and packaging and instructions and/or a delivery agent to form a formulation composition.

### Devices

[0258] The present invention provides for devices which may incorporate C/EBPα-saRNA of the present invention. These devices contain in a stable formulation available to be immediately delivered to a subject in need thereof, such as a human patient. Non-limiting examples of such a subject include a subject with hyperproliferative disorders such as cancer, tumor, or liver cirrhosis; and metabolics disorders such as NAFLD, obesity, high LDL cholesterol, or type II diabetes.

[0259] Non-limiting examples of the devices include a pump, a catheter, a needle, a transdermal patch, a pressurized olfactory delivery device, iontophoresis devices, multi-layered microfluidic devices. The devices may be employed to deliver C/EBPα-saRNA of the present invention according to single, multi- or split-dosing regiments. The devices may be employed to deliver C/EBPα-saRNA of the present invention across biological tissue, intradermal, subcutaneously, or intramuscularly. More examples of devices suitable for delivering oligonucleotides are disclosed in International Publication WO 2013/090648 filed Dec. 14, 2012, the contents of which are incorporated herein by reference in their entirety.

### Definitions

[0260] For convenience, the meaning of certain terms and phrases used in the specification, examples, and appended claims, are provided below. If there is an apparent discrepancy between the usage of a term in other parts of this specification and its definition provided in this section, the definition in this section shall prevail.

[0261] About: As used herein, the term “about” means+/−10% of the recited value.

[0262] Administered in combination: As used herein, the term “administered in combination” or “combined administration” means that two or more agents, e.g., saRNA, are administered to a subject at the same time or within an interval such that there may be an overlap of an effect of each agent on the patient. In some embodiments, they are administered within about 60, 30, 15, 10, 5, or 1 minute of one another. In some embodiments, the administrations of the agents are spaced sufficiently close together such that a combinatorial (e.g., a synergistic) effect is achieved.

[0263] Amino acid: As used herein, the terms “amino acid” and “amino acids” refer to all naturally occurring L-alpha-amino acids. The amino acids are identified by either the one-letter or three-letter designations as follows: aspartic acid (Asp: D), isoleucine (Ile: I), threonine (Thr: T), leucine (Leu: L), serine (Ser: S), tyrosine (Tyr: Y), glutamic acid (Glu: E), phenylalanine (Phe: F), proline (Pro: P), histidine (His: H), glycine (Gly: G), lysine (Lys: K), alanine (Ala: A), arginine (Arg: R), cysteine (Cys: C), tryptophan (Trp: W), valine (Val: V), glutamine (Gln: Q) methionine (Met: M), asparagines (Asn: N), where the amino acid is listed first followed parenthetically by the three and one letter codes, respectively.

[0264] Animal: As used herein, the term “animal” refers to any member of the animal kingdom. In some embodiments, “animal” refers to humans at any stage of development. In some embodiments, “animal” refers to non-human animals at any stage of development. In certain embodiments, the non-human animal is a mammal (e.g., a rodent, a mouse, a rat, a rabbit, a monkey, a dog, a cat, a sheep, cattle, a primate, or a pig). In some embodiments, animals include, but are not limited to, mammals, birds, reptiles, amphibians, fish, and worms. In some embodiments, the animal is a transgenic animal, genetically-engineered animal, or a clone.

[0265] Approximately: As used herein, the term “approximately” or “about,” as applied to one or more values of interest, refers to a value that is similar to a stated reference value. In certain embodiments, the term “approximately” or “about” refers to a range of values that fall within 25%, 20%, 19%, 18%, 17%, 16%, 15%, 14%, 13%, 12%, 11%, 10%, 9%, 8%, 7%, 6%, 5%, 4%, 3%, 2%, 1%, or less in either direction (greater than or less than) of the stated reference value unless otherwise stated or otherwise evident from the context (except where such number would exceed 100% of a possible value).

[0266] Associated with: As used herein, the terms “associated with,” “conjugated,” “linked,” “attached,” and “tethered,” when used with respect to two or more moieties, means that the moieties are physically associated or connected with one another, either directly or via one or more additional moieties that serves as a linking agent, to form a structure that is sufficiently stable so that the moieties remain physically associated under the conditions in which the structure is used, e.g., physiological conditions. An “association” need not be strictly through direct covalent chemical bonding. It may also suggest ionic or hydrogen bonding or a hybridization based connectivity sufficiently stable such that the “associated” entities remain physically associated.

[0267] Bifunctional: As used herein, the term “bifunctional” refers to any substance, molecule or moiety which is capable of or maintains at least two functions. The functions may affect the same outcome or a different outcome. The structure that produces the function may be the same or different.

[0268] Biocompatible: As used herein, the term “biocompatible” means compatible with living cells, tissues, organs or systems posing little to no risk of injury, toxicity or rejection by the immune system.

[0269] Biodegradable: As used herein, the term “biodegradable” means capable of being broken down into innocuous products by the action of living things.

[0270] Biologically active: As used herein, the phrase “biologically active” refers to a characteristic of any substance that has activity in a biological system and/or organism. For instance, a substance that, when administered to an organism, has a biological effect on that organism, is considered to be biologically active. In particular embodiments, the saRNA of the present invention may be considered biologically active if even a portion of the saRNA is biologically active or mimics an activity considered biologically relevant.

[0271] Cancer: As used herein, the term “cancer” in an individual refers to the presence of cells possessing characteristics typical of cancer-causing cells, such as uncontrolled proliferation, immortality, metastatic potential, rapid growth and proliferation rate, and certain characteristic morphological features. Often, cancer cells will be in the form of a tumor, but such cells may exist alone within an individual, or may circulate in the blood stream as independent cells, such as leukemic cells.

[0272] Cell growth: As used herein, the term “cell growth” is principally associated with growth in cell numbers, which occurs by means of cell reproduction (i.e. proliferation) when the rate of the latter is greater than the rate of cell death (e.g. by apoptosis or necrosis), to produce an increase in the size of a population of cells, although a small component of that growth may in certain circumstances be due also to an increase in cell size or cytoplasmic volume of individual cells. An agent that inhibits cell growth can thus do so by either inhibiting proliferation or stimulating cell death, or both, such that the equilibrium between these two opposing processes is altered.

[0273] Cell type: As used herein, the term “cell type” refers to a cell from a given source (e.g., a tissue, organ) or a cell in a given state of differentiation, or a cell associated with a given pathology or genetic makeup.

[0274] Chromosome: As used herein, the term “chromosome” refers to an organized structure of DNA and protein found in cells.

[0275] Complementary: As used herein, the term “complementary” as it relates to nucleic acids refers to hybridization or base pairing between nucleotides or nucleic acids, such as, for example, between the two strands of a double-stranded DNA molecule or between an oligonucleotide probe and a target are complementary.

[0276] Condition: As used herein, the term “condition” refers to the status of any cell, organ, organ system or organism. Conditions may reflect a disease state or simply the physiologic presentation or situation of an entity. Conditions may be characterized as phenotypic conditions such as the macroscopic presentation of a disease or genotypic conditions such as the underlying gene or protein expression profiles associated with the condition. Conditions may be benign or malignant.

[0277] Controlled Release: As used herein, the term “controlled release” refers to a pharmaceutical composition or compound release profile that conforms to a particular pattern of release to effect a therapeutic outcome.

[0278] Cytostatic: As used herein, “cytostatic” refers to inhibiting, reducing, suppressing the growth, division, or multiplication of a cell (e.g., a mammalian cell (e.g., a human cell)), bacterium, virus, fungus, protozoan, parasite, prion, or a combination thereof.

[0279] Cytotoxic: As used herein, “cytotoxic” refers to killing or causing injurious, toxic, or deadly effect on a cell (e.g., a mammalian cell (e.g., a human cell)), bacterium, virus, fungus, protozoan, parasite, prion, or a combination thereof.

[0280] Delivery: As used herein, “delivery” refers to the act or manner of delivering a compound, substance, entity, moiety, cargo or payload.

[0281] Delivery Agent: As used herein, “delivery agent” refers to any substance which facilitates, at least in part, the in vivo delivery of a saRNA of the present invention to targeted cells.

[0282] Destabilized: As used herein, the term “destable,” “destabilize,” or “destabilizing region” means a region or molecule that is less stable than a starting, wild-type or native form of the same region or molecule.

[0283] Detectable label: As used herein, “detectable label” refers to one or more markers, signals, or moieties which are attached, incorporated or associated with another entity that is readily detected by methods known in the art including radiography, fluorescence, chemiluminescence, enzymatic activity, absorbance and the like. Detectable labels include radioisotopes, fluorophores, chromophores, enzymes, dyes, metal ions, ligands such as biotin, avidin, streptavidin and haptens, quantum dots, and the like. Detectable labels may be located at any position in the peptides, proteins or polynucleotides, e.g, saRNA, disclosed herein. They may be within the amino acids, the peptides, proteins, or polynucleotides located at the N- or C-termini or 5′ or 3′ termini as the case may be.

[0284] Encapsulate: As used herein, the term “encapsulate” means to enclose, surround or encase.

[0285] Engineered: As used herein, embodiments of the invention are “engineered” when they are designed to have a feature or property, whether structural or chemical, that varies from a starting point, wild type or native molecule.

[0286] Equivalent subject: As used herein, “equivalent subject” may be e.g. a subject of similar age, sex and health such as liver health or cancer stage, or the same subject prior to treatment according to the invention. The equivalent subject is “untreated” in that he does not receive treatment with an saRNA according to the invention. However, he may receive a conventional anti-cancer treatment, provided that the subject who is treated with the saRNA of the invention receives the same or equivalent conventional anti-cancer treatment.

[0287] Exosome: As used herein, “exosome” is a vesicle secreted by mammalian cells.

[0288] Expression: As used herein, “expression” of a nucleic acid sequence refers to one or more of the following events: (1) production of an RNA template from a DNA sequence (e.g., by transcription); (2) processing of an RNA transcript (e.g., by splicing, editing, 5′ cap formation, and/or 3′ end processing); (3) translation of an RNA into a polypeptide or protein; and (4) post-translational modification of a polypeptide or protein.

[0289] Feature: As used herein, a “feature” refers to a characteristic, a property, or a distinctive element.

[0290] Formulation: As used herein, a “formulation” includes at least an saRNA of the present invention and a delivery agent.

[0291] Fragment: A “fragment,” as used herein, refers to a portion. For example, fragments of proteins may comprise polypeptides obtained by digesting full-length protein isolated from cultured cells.

[0292] Functional: As used herein, a “functional” biological molecule is a biological molecule in a form in which it exhibits a property and/or activity by which it is characterized.

[0293] Gene: As used herein, the term “gene” refers to a nucleic acid sequence that comprises control and most often coding sequences necessary for producing a polypeptide or precursor. Genes, however, may not be translated and instead code for regulatory or structural RNA molecules.

[0294] A gene may be derived in whole or in part from any source known to the art, including a plant, a fungus, an animal, a bacterial genome or episome, eukaryotic, nuclear or plasmid DNA, cDNA, viral DNA, or chemically synthesized DNA. A gene may contain one or more modifications in either the coding or the untranslated regions that could affect the biological activity or the chemical structure of the expression product, the rate of expression, or the manner of expression control. Such modifications include, but are not limited to, mutations, insertions, deletions, and substitutions of one or more nucleotides. The gene may constitute an uninterrupted coding sequence or it may include one or more introns, bound by the appropriate splice junctions.

[0295] Gene expression: As used herein, the term “gene expression” refers to the process by which a nucleic acid sequence undergoes successful transcription and in most instances translation to produce a protein or peptide. For clarity, when reference is made to measurement of “gene expression”, this should be understood to mean that measurements may be of the nucleic acid product of transcription, e.g., RNA or mRNA or of the amino acid product of translation, e.g., polypeptides or peptides. Methods of measuring the amount or levels of RNA, mRNA, polypeptides and peptides are well known in the art.

[0296] Genome: The term “genome” is intended to include the entire DNA complement of an organism, including the nuclear DNA component, chromosomal or extrachromosomal DNA, as well as the cytoplasmic domain (e.g., mitochondrial DNA).

[0297] Homology: As used herein, the term “homology” refers to the overall relatedness between polymeric molecules, e.g. between nucleic acid molecules (e.g. DNA molecules and/or RNA molecules) and/or between polypeptide molecules. In some embodiments, polymeric molecules are considered to be “homologous” to one another if their sequences are at least 25%, 30%, 35%, 40%, 45%, 50%, 55%, 60%, 65%, 70%, 75%, 80%, 85%, 90%, 95%, or 99% identical or similar. The term “homologous” necessarily refers to a comparison between at least two sequences (polynucleotide or polypeptide sequences). In accordance with the invention, two polynucleotide sequences are considered to be homologous if the polypeptides they encode are at least about 50%, 60%, 70%, 80%, 90%, 95%, or even 99% for at least one stretch of at least about 20 amino acids. In some embodiments, homologous polynucleotide sequences are characterized by the ability to encode a stretch of at least 4-5 uniquely specified amino acids. For polynucleotide sequences less than 60 nucleotides in length, homology is determined by the ability to encode a stretch of at least 4-5 uniquely specified amino acids. In accordance with the invention, two protein sequences are considered to be homologous if the proteins are at least about 50%, 60%, 70%, 80%, or 90% identical for at least one stretch of at least about 20 amino acids.

[0298] The term “hyperproliferative cell” may refer to any cell that is proliferating at a rate that is abnormally high in comparison to the proliferating rate of an equivalent healthy cell (which may be referred to as a “control”). An “equivalent healthy” cell is the normal, healthy counterpart of a cell. Thus, it is a cell of the same type, e.g. from the same organ, which performs the same functions(s) as the comparator cell. For example, proliferation of a hyperproliferative hepatocyte should be assessed by reference to a healthy hepatocyte, whereas proliferation of a hyperproliferative prostate cell should be assessed by reference to a healthy prostate cell.

[0299] By an “abnormally high” rate of proliferation, it is meant that the rate of proliferation of the hyperproliferative cells is increased by at least 20, 30, 40%, or at least 45, 50, 55, 60, 65, 70, 75%, or at least 80%, as compared to the proliferative rate of equivalent, healthy (non-hyperproliferative) cells. The “abnormally high” rate of proliferation may also refer to a rate that is increased by a factor of at least 2, 3, 4, 5, 6, 7, 8, 9, 10, or by a factor of at least 15, 20, 25, 30, 35, 40, 45, 50, or by a factor of at least 60, 70, 80, 90, 100, compared to the proliferative rate of equivalent, healthy cells.

[0300] The term “hyperproliferative cell” as used herein does not refer to a cell which naturally proliferates at a higher rate as compared to most cells, but is a healthy cell. Examples of cells that are known to divide constantly throughout life are skin cells, cells of the gastrointestinal tract, blood cells and bone marrow cells. However, when such cells proliferate at a higher rate than their healthy counterparts, then they are hyperproliferative.

[0301] Hyperproliferative disorder: As used herein, a “hyperproliferative disorder” may be any disorder which involves hyperproliferative cells as defined above. Examples of hyperproliferative disorders include neoplastic disorders such as cancer, psoriatic arthritis, rheumatoid arthritis, gastric hyperproliferative disorders such as inflammatory bowel disease, skin disorders including psoriasis, Reiter's syndrome, Pityriasis rubra pilaris, and hyperproliferative variants of the disorders of keratinization.

[0302] The skilled person is fully aware of how to identify a hyperproliferative cell. The presence of hyperproliferative cells within an animal may be identifiable using scans such as X-rays, MRI or CT scans. The hyperproliferative cell may also be identified, or the proliferation of cells may be assayed, through the culturing of a sample in vitro using cell proliferation assays, such as MTT, XTT, MTS or WST-1 assays. Cell proliferation in vitro can also be determined using flow cytometry.

[0303] Identity: As used herein, the term “identity” refers to the overall relatedness between polymeric molecules, e.g., between oligonucleotide molecules (e.g. DNA molecules and/or RNA molecules) and/or between polypeptide molecules. Calculation of the percent identity of two polynucleotide sequences, for example, can be performed by aligning the two sequences for optimal comparison purposes (e.g., gaps can be introduced in one or both of a first and a second nucleic acid sequences for optimal alignment and non-identical sequences can be disregarded for comparison purposes). In certain embodiments, the length of a sequence aligned for comparison purposes is at least 30%, at least 40%, at least 50%, at least 60%, at least 70%, at least 80%, at least 90%, at least 95%, or 100% of the length of the reference sequence. The nucleotides at corresponding nucleotide positions are then compared. When a position in the first sequence is occupied by the same nucleotide as the corresponding position in the second sequence, then the molecules are identical at that position. The percent identity between the two sequences is a function of the number of identical positions shared by the sequences, taking into account the number of gaps, and the length of each gap, which needs to be introduced for optimal alignment of the two sequences. The comparison of sequences and determination of percent identity between two sequences can be accomplished using a mathematical algorithm. For example, the percent identity between two nucleotide sequences can be determined using methods such as those described in Computational Molecular Biology, Lesk, A. M., ed., Oxford University Press, New York, 1988; Biocomputing: Informatics and Genome Projects, Smith, D. W., ed., Academic Press, New York, 1993; Sequence Analysis in Molecular Biology, von Heinje, G., Academic Press, 1987; Computer Analysis of Sequence Data, Part I, Griffin, A. M., and Griffin, H. G., eds., Humana Press, New Jersey, 1994; and Sequence Analysis Primer, Gribskov, M. and Devereux, J., eds., M Stockton Press, New York, 1991; each of which is incorporated herein by reference. For example, the percent identity between two nucleotide sequences can be determined using the algorithm of Meyers and Miller (CABIOS, 1989, 4:11-17), which has been incorporated into the ALIGN program (version 2.0) using a PAM120 weight residue table, a gap length penalty of 12 and a gap penalty of 4. The percent identity between two nucleotide sequences can, alternatively, be determined using the GAP program in the GCG software package using an NWSgapdna.CMP matrix. Methods commonly employed to determine percent identity between sequences include, but are not limited to those disclosed in Carillo, H., and Lipman, D., SIAM J Applied Math., 48:1073 (1988); incorporated herein by reference. Techniques for determining identity are codified in publicly available computer programs. Exemplary computer software to determine homology between two sequences include, but are not limited to, GCG program package, Devereux, J., et al., Nucleic Acids Research, 12(1), 387 (1984)), BLASTP, BLASTN, and FASTA Altschul, S. F. et al., J. Molec. Biol., 215, 403 (1990)).

[0304] Inhibit expression of a gene: As used herein, the phrase “inhibit expression of a gene” means to cause a reduction in the amount of an expression product of the gene. The expression product can be an RNA transcribed from the gene (e.g., an mRNA) or a polypeptide translated from an mRNA transcribed from the gene. Typically a reduction in the level of an mRNA results in a reduction in the level of a polypeptide translated therefrom. The level of expression may be determined using standard techniques for measuring mRNA or protein.

[0305] In vitro: As used herein, the term “in vitro” refers to events that occur in an artificial environment, e.g., in a test tube or reaction vessel, in cell culture, in a Petri dish, etc., rather than within an organism (e.g., animal, plant, or microbe).

[0306] In vivo: As used herein, the term “in vivo” refers to events that occur within an organism (e.g., animal, plant, or microbe or cell or tissue thereof).

[0307] Isolated: As used herein, the term “isolated” refers to a substance or entity that has been separated from at least some of the components with which it was associated (whether in nature or in an experimental setting). Isolated substances may have varying levels of purity in reference to the substances from which they have been associated. Isolated substances and/or entities may be separated from at least about 10%, about 20%, about 30%, about 40%, about 50%, about 60%, about 70%, about 80%, about 90%, or more of the other components with which they were initially associated. In some embodiments, isolated agents are more than about 80%, about 85%, about 90%, about 91%, about 92%, about 93%, about 94%, about 95%, about 96%, about 97%, about 98%, about 99%, or more than about 99% pure. As used herein, a substance is “pure” if it is substantially free of other components. Substantially isolated: By “substantially isolated” is meant that the compound is substantially separated from the environment in which it was formed or detected. Partial separation can include, for example, a composition enriched in the compound of the present disclosure. Substantial separation can include compositions containing at least about 50%, at least about 60%, at least about 70%, at least about 80%, at least about 90%, at least about 95%, at least about 97%, or at least about 99% by weight of the compound of the present disclosure, or salt thereof. Methods for isolating compounds and their salts are routine in the art.

[0308] Label: The term “label” refers to a substance or a compound which is incorporated into an object so that the substance, compound or object may be detectable.

[0309] Linker: As used herein, a linker refers to a group of atoms, e.g., 10-1,000 atoms, and can be comprised of the atoms or groups such as, but not limited to, carbon, amino, alkylamino, oxygen, sulfur, sulfoxide, sulfonyl, carbonyl, and imine. The linker can be attached to a modified nucleoside or nucleotide on the nucleobase or sugar moiety at a first end, and to a payload, e.g., a detectable or therapeutic agent, at a second end. The linker may be of sufficient length as to not interfere with incorporation into a nucleic acid sequence. The linker can be used for any useful purpose, such as to form saRNA conjugates, as well as to administer a payload, as described herein. Examples of chemical groups that can be incorporated into the linker include, but are not limited to, alkyl, alkenyl, alkynyl, amido, amino, ether, thioether, ester, alkylene, heteroalkylene, aryl, or heterocyclyl, each of which can be optionally substituted, as described herein. Examples of linkers include, but are not limited to, unsaturated alkanes, polyethylene glycols (e.g., ethylene or propylene glycol monomeric units, e.g., diethylene glycol, dipropylene glycol, triethylene glycol, tripropylene glycol, tetraethylene glycol, or tetraethylene glycol), and dextran polymers and derivatives thereof. Other examples include, but are not limited to, cleavable moieties within the linker, such as, for example, a disulfide bond (—S—S—) or an azo bond (—N═N—), which can be cleaved using a reducing agent or photolysis. Non-limiting examples of a selectively cleavable bond include an amido bond can be cleaved for example by the use of tris(2-carboxyethyl)phosphine (TCEP), or other reducing agents, and/or photolysis, as well as an ester bond can be cleaved for example by acidic or basic hydrolysis.

[0310] Metastasis: As used herein, the term “metastasis” means the process by which cancer spreads from the place at which it first arose as a primary tumor to distant locations in the body. Metastasis also refers to cancers resulting from the spread of the primary tumor. For example, someone with breast cancer may show metastases in their lymph system, liver, bones or lungs.

[0311] Modified: As used herein “modified” refers to a changed state or structure of a molecule of the invention. Molecules may be modified in many ways including chemically, structurally, and functionally. In one embodiment, the saRNA molecules of the present invention are modified by the introduction of non-natural nucleosides and/or nucleotides.

[0312] Naturally occurring: As used herein, “naturally occurring” means existing in nature without artificial aid.

[0313] Nucleic acid: The term “nucleic acid” as used herein, refers to a molecule comprised of one or more nucleotides, i.e., ribonucleotides, deoxyribonucleotides, or both. The term includes monomers and polymers of ribonucleotides and deoxyribonucleotides, with the ribonucleotides and/or deoxyribonucleotides being bound together, in the case of the polymers, via 5′ to 3′ linkages. The ribonucleotide and deoxyribonucleotide polymers may be single or double-stranded. However, linkages may include any of the linkages known in the art including, for example, nucleic acids comprising 5′ to 3′ linkages. The nucleotides may be naturally occurring or may be synthetically produced analogs that are capable of forming base-pair relationships with naturally occurring base pairs. Examples of non-naturally occurring bases that are capable of forming base-pairing relationships include, but are not limited to, aza and deaza pyrimidine analogs, aza and deaza purine analogs, and other heterocyclic base analogs, wherein one or more of the carbon and nitrogen atoms of the pyrimidine rings have been substituted by heteroatoms, e.g., oxygen, sulfur, selenium, phosphorus, and the like.

[0314] Patient: As used herein, “patient” refers to a subject who may seek or be in need of treatment, requires treatment, is receiving treatment, will receive treatment, or a subject who is under care by a trained professional for a particular disease or condition.

[0315] Peptide: As used herein, “peptide” is less than or equal to 50 amino acids long, e.g., about 5, 10, 15, 20, 25, 30, 35, 40, 45, or 50 amino acids long.

[0316] Pharmaceutically acceptable: The phrase “pharmaceutically acceptable” is employed herein to refer to those compounds, materials, compositions, and/or dosage forms which are, within the scope of sound medical judgment, suitable for use in contact with the tissues of human beings and animals without excessive toxicity, irritation, allergic response, or other problem or complication, commensurate with a reasonable benefit/risk ratio.

[0317] Pharmaceutically acceptable excipients: The phrase “pharmaceutically acceptable excipient,” as used herein, refers any ingredient other than the compounds described herein (for example, a vehicle capable of suspending or dissolving the active compound) and having the properties of being substantially nontoxic and non-inflammatory in a patient. Excipients may include, for example: antiadherents, antioxidants, binders, coatings, compression aids, disintegrants, dyes (colors), emollients, emulsifiers, fillers (diluents), film formers or coatings, flavors, fragrances, glidants (flow enhancers), lubricants, preservatives, printing inks, sorbents, suspensing or dispersing agents, sweeteners, and waters of hydration. Exemplary excipients include, but are not limited to: butylated hydroxytoluene (BHT), calcium carbonate, calcium phosphate (dibasic), calcium stearate, croscarmellose, crosslinked polyvinyl pyrrolidone, citric acid, crospovidone, cysteine, ethylcellulose, gelatin, hydroxypropyl cellulose, hydroxypropyl methylcellulose, lactose, magnesium stearate, maltitol, mannitol, methionine, methylcellulose, methyl paraben, microcrystalline cellulose, polyethylene glycol, polyvinyl pyrrolidone, povidone, pregelatinized starch, propyl paraben, retinyl palmitate, shellac, silicon dioxide, sodium carboxymethyl cellulose, sodium citrate, sodium starch glycolate, sorbitol, starch (corn), stearic acid, sucrose, talc, titanium dioxide, vitamin A, vitamin E, vitamin C, and xylitol.

[0318] Pharmaceutically acceptable salts: The present disclosure also includes pharmaceutically acceptable salts of the compounds described herein. As used herein, “pharmaceutically acceptable salts” refers to derivatives of the disclosed compounds wherein the parent compound is modified by converting an existing acid or base moiety to its salt form (e.g., by reacting the free base group with a suitable organic acid). Examples of pharmaceutically acceptable salts include, but are not limited to, mineral or organic acid salts of basic residues such as amines; alkali or organic salts of acidic residues such as carboxylic acids; and the like. Representative acid addition salts include acetate, adipate, alginate, ascorbate, aspartate, benzenesulfonate, benzoate, bisulfate, borate, butyrate, camphorate, camphorsulfonate, citrate, cyclopentanepropionate, digluconate, dodecylsulfate, ethanesulfonate, fumarate, glucoheptonate, glycerophosphate, hemisulfate, heptonate, hexanoate, hydrobromide, hydrochloride, hydroiodide, 2-hydroxy-ethanesulfonate, lactobionate, lactate, laurate, lauryl sulfate, malate, maleate, malonate, methanesulfonate, 2-naphthalenesulfonate, nicotinate, nitrate, oleate, oxalate, palmitate, pamoate, pectinate, persulfate, 3-phenylpropionate, phosphate, picrate, pivalate, propionate, stearate, succinate, sulfate, tartrate, thiocyanate, toluenesulfonate, undecanoate, valerate salts, and the like. Representative alkali or alkaline earth metal salts include sodium, lithium, potassium, calcium, magnesium, and the like, as well as nontoxic ammonium, quaternary ammonium, and amine cations, including, but not limited to ammonium, tetramethylammonium, tetraethylammonium, methylamine, dimethylamine, trimethylamine, triethylamine, ethylamine, and the like. The pharmaceutically acceptable salts of the present disclosure include the conventional non-toxic salts of the parent compound formed, for example, from non-toxic inorganic or organic acids. The pharmaceutically acceptable salts of the present disclosure can be synthesized from the parent compound which contains a basic or acidic moiety by conventional chemical methods. Generally, such salts can be prepared by reacting the free acid or base forms of these compounds with a stoichiometric amount of the appropriate base or acid in water or in an organic solvent, or in a mixture of the two; generally, nonaqueous media like ether, ethyl acetate, ethanol, isopropanol, or acetonitrile are preferred. Lists of suitable salts are found in Remington's Pharmaceutical Sciences, 17^{th} ed., Mack Publishing Company, Easton, Pa., 1985, p. 1418, Pharmaceutical Salts: Properties, Selection, and Use, P. H. Stahl and C. G. Wermuth (eds.), Wiley-VCH, 2008, and Berge et al., Journal of Pharmaceutical Science, 66, 1-19 (1977), each of which is incorporated herein by reference in its entirety.

[0319] Pharmaceutically acceptable solvate: The term “pharmaceutically acceptable solvate,” as used herein, means a compound of the invention wherein molecules of a suitable solvent are incorporated in the crystal lattice. A suitable solvent is physiologically tolerable at the dosage administered. For example, solvates may be prepared by crystallization, recrystallization, or precipitation from a solution that includes organic solvents, water, or a mixture thereof. Examples of suitable solvents are ethanol, water (for example, mono-, di-, and tri-hydrates), N-methylpyrrolidinone (NMP), dimethyl sulfoxide (DMSO), N,N′-dimethylformamide (DMF), N,N′-dimethylacetamide (DMAC), 1,3-dimethyl-2-imidazolidinone (DMEU), 1,3-dimethyl-3,4,5,6-tetrahydro-2-(1H)-pyrimidinone (DMPU), acetonitrile (ACN), propylene glycol, ethyl acetate, benzyl alcohol, 2-pyrrolidone, benzyl benzoate, and the like. When water is the solvent, the solvate is referred to as a “hydrate.”

[0320] Pharmacologic effect: As used herein, a “pharmacologic effect” is a measurable biologic phenomenon in an organism or system which occurs after the organism or system has been contacted with or exposed to an exogenous agent. Pharmacologic effects may result in therapeutically effective outcomes such as the treatment, improvement of one or more symptoms, diagnosis, prevention, and delay of onset of disease, disorder, condition or infection. Measurement of such biologic phenomena may be quantitative, qualitative or relative to another biologic phenomenon. Quantitative measurements may be statistically significant. Qualitative measurements may be by degree or kind and may be at least 10%, 20%, 30%, 40%, 50%, 60%, 70%, 80%, 90% or more different. They may be observable as present or absent, better or worse, greater or less. Exogenous agents, when referring to pharmacologic effects are those agents which are, in whole or in part, foreign to the organism or system. For example, modifications to a wild type biomolecule, whether structural or chemical, would produce an exogenous agent. Likewise, incorporation or combination of a wild type molecule into or with a compound, molecule or substance not found naturally in the organism or system would also produce an exogenous agent. The saRNA of the present invention, comprises exogenous agents. Examples of pharmacologic effects include, but are not limited to, alteration in cell count such as an increase or decrease in neutrophils, reticulocytes, granulocytes, erythrocytes (red blood cells), megakaryocytes, platelets, monocytes, connective tissue macrophages, epidermal langerhans cells, osteoclasts, dendritic cells, microglial cells, neutrophils, eosinophils, basophils, mast cells, helper T cells, suppressor T cells, cytotoxic T cells, natural killer T cells, B cells, natural killer cells, or reticulocytes. Pharmacologic effects also include alterations in blood chemistry, pH, hemoglobin, hematocrit, changes in levels of enzymes such as, but not limited to, liver enzymes AST and ALT, changes in lipid profiles, electrolytes, metabolic markers, hormones or other marker or profile known to those of skill in the art.

[0321] Physicochemical: As used herein, “physicochemical” means of or relating to a physical and/or chemical property.

[0322] Preventing: As used herein, the term “preventing” refers to partially or completely delaying onset of an infection, disease, disorder and/or condition; partially or completely delaying onset of one or more symptoms, features, or clinical manifestations of a particular infection, disease, disorder, and/or condition; partially or completely delaying onset of one or more symptoms, features, or manifestations of a particular infection, disease, disorder, and/or condition; partially or completely delaying progression from an infection, a particular disease, disorder and/or condition; and/or decreasing the risk of developing pathology associated with the infection, the disease, disorder, and/or condition.

[0323] Prodrug: The present disclosure also includes prodrugs of the compounds described herein. As used herein, “prodrugs” refer to any substance, molecule or entity which is in a form predicate for that substance, molecule or entity to act as a therapeutic upon chemical or physical alteration. Prodrugs may by covalently bonded or sequestered in some way and which release or are converted into the active drug moiety prior to, upon or after administered to a mammalian subject. Prodrugs can be prepared by modifying functional groups present in the compounds in such a way that the modifications are cleaved, either in routine manipulation or in vivo, to the parent compounds. Prodrugs include compounds wherein hydroxyl, amino, sulfhydryl, or carboxyl groups are bonded to any group that, when administered to a mammalian subject, cleaves to form a free hydroxyl, amino, sulfhydryl, or carboxyl group respectively. Preparation and use of prodrugs is discussed in T. Higuchi and V. Stella, “Pro-drugs as Novel Delivery Systems,” Vol. 14 of the A.C.S. Symposium Series, and in Bioreversible Carriers in Drug Design, ed. Edward B. Roche, American Pharmaceutical Association and Pergamon Press, 1987, both of which are hereby incorporated by reference in their entirety.

[0324] Prognosing: As used herein, the term “prognosing” means a statement or claim that a particular biologic event will, or is very likely to, occur in the future.

[0325] Progression: As used herein, the term “progression” or “cancer progression” means the advancement or worsening of or toward a disease or condition.

[0326] Proliferate: As used herein, the term “proliferate” means to grow, expand or increase or cause to grow, expand or increase rapidly. “Proliferative” means having the ability to proliferate. “Anti-proliferative” means having properties counter to or inapposite to proliferative properties.

[0327] Protein: A “protein” means a polymer of amino acid residues linked together by peptide bonds. The term, as used herein, refers to proteins, polypeptides, and peptides of any size, structure, or function. Typically, however, a protein will be at least 50 amino acids long. In some instances the protein encoded is smaller than about 50 amino acids. In this case, the polypeptide is termed a peptide. If the protein is a short peptide, it will be at least about 10 amino acid residues long. A protein may be naturally occurring, recombinant, or synthetic, or any combination of these. A protein may also comprise a fragment of a naturally occurring protein or peptide. A protein may be a single molecule or may be a multi-molecular complex. The term protein may also apply to amino acid polymers in which one or more amino acid residues are an artificial chemical analogue of a corresponding naturally occurring amino acid.

[0328] Protein expression: The term “protein expression” refers to the process by which a nucleic acid sequence undergoes translation such that detectable levels of the amino acid sequence or protein are expressed.

[0329] Purified: As used herein, “purify,” “purified,” “purification” means to make substantially pure or clear from unwanted components, material defilement, admixture or imperfection.

[0330] Regression: As used herein, the term “regression” or “degree of regression” refers to the reversal, either phenotypically or genotypically, of a cancer progression. Slowing or stopping cancer progression may be considered regression.

[0331] Sample: As used herein, the term “sample” or “biological sample” refers to a subset of its tissues, cells or component parts (e.g. body fluids, including but not limited to blood, mucus, lymphatic fluid, synovial fluid, cerebrospinal fluid, saliva, amniotic fluid, amniotic cord blood, urine, vaginal fluid and semen). A sample further may include a homogenate, lysate or extract prepared from a whole organism or a subset of its tissues, cells or component parts, or a fraction or portion thereof, including but not limited to, for example, plasma, serum, spinal fluid, lymph fluid, the external sections of the skin, respiratory, intestinal, and genitourinary tracts, tears, saliva, milk, blood cells, tumors, organs. A sample further refers to a medium, such as a nutrient broth or gel, which may contain cellular components, such as proteins or nucleic acid molecule.

[0332] Signal Sequences: As used herein, the phrase “signal sequences” refers to a sequence which can direct the transport or localization of a protein.

[0333] Single unit dose: As used herein, a “single unit dose” is a dose of any therapeutic administered in one dose/at one time/single route/single point of contact, i.e., single administration event.

[0334] Similarity: As used herein, the term “similarity” refers to the overall relatedness between polymeric molecules, e.g. between polynucleotide molecules (e.g. DNA molecules and/or RNA molecules) and/or between polypeptide molecules. Calculation of percent similarity of polymeric molecules to one another can be performed in the same manner as a calculation of percent identity, except that calculation of percent similarity takes into account conservative substitutions as is understood in the art.

[0335] Split dose: As used herein, a “split dose” is the division of single unit dose or total daily dose into two or more doses.

[0336] Stable: As used herein “stable” refers to a compound that is sufficiently robust to survive isolation to a useful degree of purity from a reaction mixture, and preferably capable of formulation into an efficacious therapeutic agent.

[0337] Stabilized: As used herein, the term “stabilize”, “stabilized,” “stabilized region” means to make or become stable.

[0338] Subject: As used herein, the term “subject” or “patient” refers to any organism to which a composition in accordance with the invention may be administered, e.g., for experimental, diagnostic, prophylactic, and/or therapeutic purposes. Typical subjects include animals (e.g., mammals such as mice, rats, rabbits, non-human primates, and humans) and/or plants.

[0339] Substantially: As used herein, the term “substantially” refers to the qualitative condition of exhibiting total or near-total extent or degree of a characteristic or property of interest. One of ordinary skill in the biological arts will understand that biological and chemical phenomena rarely, if ever, go to completion and/or proceed to completeness or achieve or avoid an absolute result. The term “substantially” is therefore used herein to capture the potential lack of completeness inherent in many biological and chemical phenomena.

[0340] Substantially equal: As used herein as it relates to time differences between doses, the term means plus/minus 2%.

[0341] Substantially simultaneously: As used herein and as it relates to plurality of doses, the term means within 2 seconds.

[0342] Suffering from: An individual who is “suffering from” a disease, disorder, and/or condition has been diagnosed with or displays one or more symptoms of a disease, disorder, and/or condition.

[0343] Susceptible to: An individual who is “susceptible to” a disease, disorder, and/or condition has not been diagnosed with and/or may not exhibit symptoms of the disease, disorder, and/or condition but harbors a propensity to develop a disease or its symptoms. In some embodiments, an individual who is susceptible to a disease, disorder, and/or condition (for example, cancer) may be characterized by one or more of the following: (1) a genetic mutation associated with development of the disease, disorder, and/or condition; (2) a genetic polymorphism associated with development of the disease, disorder, and/or condition; (3) increased and/or decreased expression and/or activity of a protein and/or nucleic acid associated with the disease, disorder, and/or condition; (4) habits and/or lifestyles associated with development of the disease, disorder, and/or condition; (5) a family history of the disease, disorder, and/or condition; and (6) exposure to and/or infection with a microbe associated with development of the disease, disorder, and/or condition. In some embodiments, an individual who is susceptible to a disease, disorder, and/or condition will develop the disease, disorder, and/or condition. In some embodiments, an individual who is susceptible to a disease, disorder, and/or condition will not develop the disease, disorder, and/or condition.

[0344] Sustained release: As used herein, the term “sustained release” refers to a pharmaceutical composition or compound release profile that conforms to a release rate over a specific period of time.

[0345] Synthetic: The term “synthetic” means produced, prepared, and/or manufactured by the hand of man. Synthesis of polynucleotides or polypeptides or other molecules of the present invention may be chemical or enzymatic.

[0346] Targeted Cells: As used herein, “targeted cells” refers to any one or more cells of interest. The cells may be found in vitro, in vivo, in situ or in the tissue or organ of an organism. The organism may be an animal, preferably a mammal, more preferably a human and most preferably a patient.

[0347] Therapeutic Agent: The term “therapeutic agent” refers to any agent that, when administered to a subject, has a therapeutic, diagnostic, and/or prophylactic effect and/or elicits a desired biological and/or pharmacological effect.

[0348] Therapeutically effective amount: As used herein, the term “therapeutically effective amount” means an amount of an agent to be delivered (e.g., nucleic acid, drug, therapeutic agent, diagnostic agent, prophylactic agent, etc.) that is sufficient, when administered to a subject suffering from or susceptible to an infection, disease, disorder, and/or condition, to treat, improve symptoms of, diagnose, prevent, and/or delay the onset of the infection, disease, disorder, and/or condition.

[0349] Therapeutically effective outcome: As used herein, the term “therapeutically effective outcome” means an outcome that is sufficient in a subject suffering from or susceptible to an infection, disease, disorder, and/or condition, to treat, improve symptoms of, diagnose, prevent, and/or delay the onset of the infection, disease, disorder, and/or condition.

[0350] Total daily dose: As used herein, a “total daily dose” is an amount given or prescribed in 24 hr period. It may be administered as a single unit dose.

[0351] Transcription factor: As used herein, the term “transcription factor” refers to a DNA-binding protein that regulates transcription of DNA into RNA, for example, by activation or repression of transcription. Some transcription factors effect regulation of transcription alone, while others act in concert with other proteins. Some transcription factor can both activate and repress transcription under certain conditions. In general, transcription factors bind a specific target sequence or sequences highly similar to a specific consensus sequence in a regulatory region of a target gene. Transcription factors may regulate transcription of a target gene alone or in a complex with other molecules.

[0352] Treating: As used herein, the term “treating” refers to partially or completely alleviating, ameliorating, improving, relieving, delaying onset of, inhibiting progression of, reducing severity of, and/or reducing incidence of one or more symptoms or features of a particular infection, disease, disorder, and/or condition. For example, “treating” cancer may refer to inhibiting survival, growth, and/or spread of a tumor. Treatment may be administered to a subject who does not exhibit signs of a disease, disorder, and/or condition and/or to a subject who exhibits only early signs of a disease, disorder, and/or condition for the purpose of decreasing the risk of developing pathology associated with the disease, disorder, and/or condition.

[0353] The phrase “a method of treating” or its equivalent, when applied to, for example, cancer refers to a procedure or course of action that is designed to reduce, eliminate or prevent the number of cancer cells in an individual, or to alleviate the symptoms of a cancer. “A method of treating” cancer or another proliferative disorder does not necessarily mean that the cancer cells or other disorder will, in fact, be completely eliminated, that the number of cells or disorder will, in fact, be reduced, or that the symptoms of a cancer or other disorder will, in fact, be alleviated. Often, a method of treating cancer will be performed even with a low likelihood of success, but which, given the medical history and estimated survival expectancy of an individual, is nevertheless deemed an overall beneficial course of action.

[0354] Tumor growth: As used herein, the term “tumor growth” or “tumor metastases growth”, unless otherwise indicated, is used as commonly used in oncology, where the term is principally associated with an increased mass or volume of the tumor or tumor metastases, primarily as a result of tumor cell growth.

[0355] Tumor Burden: As used herein, the term “tumor burden” refers to the total Tumor Volume of all tumor nodules with a diameter in excess of 3 mm carried by a subject.

[0356] Tumor Volume: As used herein, the term “tumor volume” refers to the size of a tumor. The tumor volume in mm³ is calculated by the formula: volume=(width)²×length/2.

[0357] Unmodified: As used herein, “unmodified” refers to any substance, compound or molecule prior to being changed in any way. Unmodified may, but does not always, refer to the wild type or native form of a biomolecule. Molecules may undergo a series of modifications whereby each modified molecule may serve as the “unmodified” starting molecule for a subsequent modification.

### Equivalents and Scope

[0358] Those skilled in the art will recognize, or be able to ascertain using no more than routine experimentation, many equivalents to the specific embodiments in accordance with the invention described herein. The scope of the present invention is not intended to be limited to the above Description, but rather is as set forth in the appended claims.

[0359] In the claims, articles such as “a,” “an,” and “the” may mean one or more than one unless indicated to the contrary or otherwise evident from the context. Claims or descriptions that include “or” between one or more members of a group are considered satisfied if one, more than one, or all of the group members are present in, employed in, or otherwise relevant to a given product or process unless indicated to the contrary or otherwise evident from the context. The invention includes embodiments in which exactly one member of the group is present in, employed in, or otherwise relevant to a given product or process. The invention includes embodiments in which more than one, or all of the group members are present in, employed in, or otherwise relevant to a given product or process.

[0360] It is also noted that the term “comprising” is intended to be open and permits the inclusion of additional elements or steps.

[0361] Where ranges are given, endpoints are included. Furthermore, it is to be understood that unless otherwise indicated or otherwise evident from the context and understanding of one of ordinary skill in the art, values that are expressed as ranges can assume any specific value or subrange within the stated ranges in different embodiments of the invention, to the tenth of the unit of the lower limit of the range, unless the context clearly dictates otherwise.

[0362] In addition, it is to be understood that any particular embodiment of the present invention that falls within the prior art may be explicitly excluded from any one or more of the claims. Since such embodiments are deemed to be known to one of ordinary skill in the art, they may be excluded even if the exclusion is not set forth explicitly herein. Any particular embodiment of the compositions of the invention (e.g., any nucleic acid or protein encoded thereby; any method of production; any method of use; etc.) can be excluded from any one or more claims, for any reason, whether or not related to the existence of prior art.

[0363] All cited sources, for example, references, publications, databases, database entries, and art cited herein, are incorporated into this application by reference, even if not expressly stated in the citation. In case of conflicting statements of a cited source and the instant application, the statement in the instant application shall control.

[0364] The invention is further illustrated by the following non-limiting examples.

### EXAMPLES

### Materials and Procedures:

[0365] Transfection of C/EBPα-saRNA into HepG2 and Rat-Liver Epithelial Cell Lines

[0366] HepG2 is a liver cell line derived from a human hepatoblastoma that is free of known hepatotropic viral agents and expresses genes involved in a wide variety of liver-specific metabolic functions. HepG2 cells were cultured in Roswell Park Memorial Institute medium (RPMI) supplemented with 100 units/ml penicillin, 0.1 mg/ml streptomycin, 2 mmol/L glutamine (SIGMA) and 10% fetal bovine serum (LABTECH INTERNATIONAL). For C/EBPα-saRNA transfection, cells were grown to 60% confluency in 24 well plates prior to transfection of 5, 10 and 20 nmols of saRNA using nanofectamine (PAA, UK) following manufacturer's protocol. This process was repeated three times at 16 hours intervals before cells were harvested for isolation of total RNA for mRNA analysis.

### Albumin ELISA

[0367] Rat liver epithelial cells and HepG2 cells were cultured in phenol-red free RPMI media in the presence of charcoal stripped FCS. Following three sets of saRNA transfections at 8 hours, 16 hours and 24 hours, the culture media was collected for total murine albumin ELISA (ASSAY MAX, ASSAY PRO USA) following the manufacturer's instructions.

### WST-1 Assay

[0368] Cell proliferation was quantified at 16, 24 and 96 hours following C/EBPα-saRNA transfection by mitochondrial dehydrogenase expression analysis, using WST-1 reagent following the manufacturer's guideline (ROCHE, UK). Briefly, the WST-1 reagent was used at 1:100 dilution to plates and incubated for one hour. The enzymatic reaction was measured at 450 nm using BIO-TEK ELISA reader.

Isolation of Total RNA from Cell Lines

[0369] Total RNA extraction form cell lines was performed using the RNAQUEOUS-MICRO kit (AMBION, UK) following the manufacturer's instructions. Briefly, the cells were gently centrifuged followed by 3 pulses of sonication at Output 3 in lysis buffer (AMBION, UK). The cell lysates were then processed through an RNA binding column, followed by multiple washes and elution. The total RNA isolated was quantified by a NANODROP 2000 spectrophotometer. 500 ng of total extracted RNA was processed for elimination of genomic DNA followed by reverse transcription using the QUANTITECT® Reverse Transcription kit from QIAGEN.

### Animal Experiments

[0370] A clinically relevant rat liver tumor model previously described was used [Huang et al., Mol Ther, vol. 16, 1681-1687 (2008), the contents of which are incorporated herein by reference in their entirety]. For in vivo therapy C/EBPα-saRNA was reconstituted with 100 ul of TEA core PAMAM dendrimer (Centre Interdisciplinaire de Nanoscience de Marseille, 13288 Marseille, France). 10 cirrhotic animals were treated with 3× doses via tail vein injections in the 1^{st} week. Control animals (n=10) were injected with equal volume of phosphate buffered saline (PBS) or scramble-saRNA. All animals received humane care according to the criteria outlined in the “Guide for the Care and Use of Laboratory Animals” prepared by the National Academy of Sciences and published by the National Institutes of Health (NIH publication 86-23 revised 1985). The following sequences of scramble-saRNA were used:

Scramble saRNA_SS:
(SEQ ID NO. 33)
ACUACUGAGUGACAGUAGAUU
Scramble saRNA_AS:
(SEQ ID NO. 34)
UCUACUGUCA-CUCAGUAGUU

### Gene Microarray Profile

[0371] The Human Liver Cancer RT² Profiler™ (QIAGEN, Germantown, MD) was used to profile the expression of 84 key genes involved in the progression of hepatocellular carcinoma. 500 ng of purified RNA was reverse transcribed for 15 min with RT² Frist Strand kit (QIAGEN, Germantown, MD) using random hexamers and oligo-dT primers for unbiased reverse transcription. First strand synthesized cDNA was then transferred into the array plates for amplification in a 7900HT Applied Biosystems Real Time cycler using RT² SYBR® Green ROX™ qPCR Master mix (QIAGEN, Germantown, MD) at 1 cycle for 10 min at 95° C. and 40 cycles (15 sec at 95° C. and 1 min at 60° C.) for fluorescence data collection. Threshold cycle (C_{T}) for each well was manually calculated and exported for data analysis and clustering using SABiosciences array specific Data Analysis software (QIAGEN, Germantown, MD).

### Assessment of Tumor Burden

[0372] To assess tumor progression after treatment, all the treated animals were killed 1 week after C/EBPα-saRNA-dendrimer injection. The body, liver, lung, and spleen were weighed, and the aspects of all organs were recorded. After the animals were killed, all liver lobes were promptly removed and weighed, and the diameters of all the macroscopically visible nodules on the liver surface and in the 5 mm sliced sections were measured. Tumor burden was determined in terms of the total volume of all the tumor nodules with diameter >3 mm.

### Example 1. Therapeutic Effect of C/EBPα-saRNA in Treating Liver Cirrhosis and HCC

[0373] Additional experimental procedures may be found in the accepted manuscript of Reebye et al. published by Hepatology on Aug. 8, 2013, the contents of which are incorporated herein by reference in their entirety.

Expression level of C/EBPα and Albumin in HepG2 Cells Transfected with C/EBPα-saRNA

[0374] The effect of transfecting C/EBPα-saRNA on C/EBPα and albumin transcript levels was assessed. The following C/EBPα-saRNA duplex (sense/antisense) targeted to C/EBPα was used for this study:

AW1 sense strand:
(SEQ ID NO. 1)
CGGUCAUUGUCACUGGUCA
AW1 antisense strand:
(SEQ ID NO. 2)
UGACCAGUGACAAUGACCG

[0375] The properties of the saRNA molecules are as follows:

| Property | AW1 sense | | AW2 sense | |
|---|---|---|---|---|
| GC content | 47.6% | | 47.6% | |
| Melting temperature | 67.4° | C. | 69.9° | C. |
| Molecular Weight | 6627.0 | g/mol | 6696.1 | g/mol |
| Extinction Coefficient | 201800 | L/(mol · cm) | 209600 | L/(mol · cm) |

| | | |
|---|---|---|
| nmol/OD₂₆₀ | 4.95 | 4.77 |
| ug/OD₂₆₀ | 32.84 | 31.95 |

[0376] Upon transfection of 20 nM C/EBPα-saRNA, both C/EBPα (FIG. 3A) and albumin mRNA transcripts (FIG. 3B) increased over two fold. Increasing the amounts of C/EBPα-saRNA (5, 10, and 20 nM) dose dependently enhanced C/EBPα mRNA transcript levels (FIG. 3C). The maximum expression of albumin was achieved with 50 nM of C/EBPα-saRNA, with no further dose dependent increase at higher saRNA levels (FIG. 3D). Analysis of the promoter regions of C/EBPα (FIG. 3E), the binding box of albumin promoter (albumin D-box) binding protein (DBP) (FIG. 3F) and albumin (FIG. 3G) showed the presence of the core C/EBPα binding motifs (GCAAT). An EPITECT™ Methyl PCR assay also demonstrated reduced methylation at the CpG islands of both C/EBPA and DBP promoters following transfection of C/EBPα-saRNA (FIGS. 4A and 4B).

[0377] To determine the biological relevance of increased albumin mRNA transcripts in C/EBPα-saRNA transfected HepG2 cells, a human albumin specific enzyme-linked immunosorbent assay (ELISA) was performed. Secreted albumin peptide was detected in the culture media of the transfected cells (FIG. 4C). To establish if enhanced albumin secretion in HepG2 cells by C/EBPα-saRNA also affected other hepatocytes specific functions and maintenance of hepatocyte differentiation, expression levels of the ornithine cycle enzyme ornithine transcarbamylase (OTC) and alpha-fetoprotein (AFP) were each measured by measuring mRNA transcripts levels. C/EBPα-saRNA caused an increase in OTC expression levels (FIG. 4D) suggesting an improved ability of urea production. The expression level of AFP decreased (FIG. 4E) indicative of the negative regulation typically observed with normal hepatocytes. In addition to the observed gene expression changes described, it is also observed that C/EBPα-saRNA caused a marked down-regulation of HepG2 cell proliferation (FIG. 4F). This observation confirms the known anti-proliferative effects of C/EBPα.

### Intravenous Injection of C/EBPα-saRNA in Male Wistar Rats Bearing Liver Cirrhosis/Hepatocellular Carcinoma (HCC) Promoted Increased Circulating Levels of Albumin, Amelioration of Liver Function and a Reduced Tumor Burden

[0378] C/EBPα-RNA was assembled into poly(amidoamine) (PAMAM) dendrimers, called C/EBPα-saRNA-dendrimer, for delivery intravenously. The stability of C/EBPα-saRNA was initially tested in circulating serum by performing a nuclease activity assay using blood samples from C/EBPα-saRNA treated rats. A significant reduction in the stability of C/EBPα-saRNA duplex by 48 hours was observed (FIGS. 5A and 5B). Thus, cirrhotic rats were injected over a period of one week with repeat doses of 200 uL of 0.1 nmol/uL C/EBPα-saRNA-dendrimer. A standard dose was made from 50 uL of 20 nanomoles C/EBPα-saRNA mixed with 50 uL generation 5 triethanolamine (TEA)-core PAMAM dendrimer and 100 uL of RNase/Dnase free water. The concentration of C/EBPα-saRNA was 0.1 nmol/uL.

[0379] Measurement of circulating albumin showed a significant increase of over 30% after three doses of 200 uL of 0.1 nmol/uL C/EBPα-saRNA-dendrimer injection when compared to PBS control or scramble-saRNA-dendrimer control groups (FIG. 5C). Further blood analysis demonstrated that bilirubin levels was significantly lower in the C/EBPα-saRNA-dendrimer treated group by at least 17% when compared to both control groups (FIG. 5D). There was also a significant drop in levels of the liver enzymes aspartate aminotransferase (AST) and alanine aminotransferase (ALT) by at least 10% and 30% respectively in the C/EBPα-saRNA-dendrimer treated group when compared to both control groups (FIGS. 5E and 5F). Histological examination of the liver showed a significant reduction in tumor nodules from C/EBPα-saRNA-dendrimer injected rats when compared to both control groups (FIGS. 6A and 6B). These results were consistent with immunohistology studies of tissue sections from C/EBPα-saRNA treated rat liver stained for placenta-form of glutathione S-transferase (GST-p). Independent analysis suggested that there was evidence of reduced carcinogenesis by treatment with C/EBPα-saRNA-dendrimer when compared to the PBS control or scramble-saRNA-dendrimer control groups. Furthermore, there were no differences in liver fibrosis between the PBS control, scramble-saRNA-dendrimer or C/EBPα-saRNA-dendrimer treated groups (FIG. 6C). The average density of positive staining for GST-p from control groups was 70 (±5.0%), and that from C/EBPα-saRNA-dendrimer injected rats was 32 (±6.5%). Since overexpression of GST-p is observed during rat liver pre-neoplastic state and neoplastic transformation, this data suggests that C/EBPα-saRNA-dendrimer treatment may reduce this process.

[0380] Total RNA extracted from liver biopsies of 7 animals from each group were screened for mRNA transcript levels of albumin (FIG. 7A), C/EBPα (FIG. 7B), hepatocyte nuclear factor 4-alpha (HNF4α) (FIG. 7C) and hepatocyte nuclear factor 1-alpha (HNF1α) (FIG. 7D). A significant increase in mRNA level was observed for all the factors, consistent with the role of HNF4α in hepatocyte differentiation together with C/EBPα and HNF1α in promoting expression of albumin. Taken together, lower mRNA levels of hepatocyte growth factor (HGF) (FIG. 7E) and increased levels of 4-hydroxyphenylpyruvic acid dioxygenase (HPD1) (FIG. 7F) and plasminogen (FIG. 7G) were suggestive of improved liver function in these cirrhotic rats treated with C/EBPα-saRNA-dendrimer. Therefore, treatments with C/EBPα-saRNA not only show utility in cancer therapy, but show improved organ function in the liver.

Pathway Gene Microarray Analysis Suggests that C/EBPα-saRNA Contributes to Up-Regulation of Tumor Suppressor Genes and Down-Regulation of Genes Involves in Liver Cancer

[0381] To investigate other liver specific factors that might be affected in response to C/EBPα-saRNA; the gene expression profiles of a panel of 84 liver cancer specific genes (QIAGEN/SABIOSCIENCES Human Liver Cancer RT² PROFILER™) in C/EBPα-saRNA transfected HepG2 cells were analyzed. Of particular interest was the observed up-regulation of 20 genes (Table 5), 18 of which are known tumor suppressor genes in HCC (Table 7) including retinoblastoma (RB). The most significantly up-regulated (over 3 fold) included the death agonist gene BH3-interacting domain (BID), and tumor protein 53 gene (TP53), encoding p53. BID interacts with BCl2-associated X protein (BAX) which in turn is up-regulated by wild type p53 to regulate cell cycle arrest and apoptosis in response to DNA damage. The genes down-regulated are shown in Table 6.

TABLE 5
Gene expression (up-regulated by C/EBPα-saRNA)

| Gene Symbol | Name | SEQ ID | RefSEQ | Fold Up | p value |
|---|---|---|---|---|---|
| BAX | BCL2-associated X protein | 35 | NM_004324.3 | 1.12 | 0.0027 |
| BID | BH3 interacting domain | 36 | NM_197966.2 | 13.58 | 0.0001 |
| | death agonist | | | | |
| CASP8 | Caspase 8 | 37 | NM_001080125.1 | 6.69 | 0.0000 |
| DAB2IP | Disabled homolog 2- | 38 | NM_032552.2 | 2.59 | 0.0042 |
| | interacting protein | | | | |
| DLC1 | Deleted in Liver Cancer 1 | 39 | NM_182643.2 | 4.84 | 0.0001 |
| FAS | Fas cell surface death | 40 | NM_000043.4 | 1.64 | 0.0004 |
| | receptor | | | | |
| FHIT | fragile histidine triad | 41 | NM_001166243.1 | 2.84 | 0.0021 |
| GADD45B | growth arrest and DNA- | 42 | NM_015675.3 | 3.35 | 0.0001 |
| | damage-inducible, beta | | | | |
| HHIP | hedgehog interacting | 43 | NM_022475.2 | 1.59 | 0.0054 |
| | protein | | | | |
| IGF2 | insulin-like growth factor 2 | 44 | NM_000612.4 | 9.75 | 0.0001 |
| LEF1 | lymphoid enhancer-binding | 45 | NM_016269.4 | 17.86 | 0.0001 |
| | factor 1 | | | | |
| PTEN | phosphatase and tensin | 46 | NM_000314.4 | 1.28 | 0.0013 |
| | homolog | | | | |
| PTK2 | protein tyrosine kinase 2 | 47 | NM_001199649.1 | 2.87 | 0.0001 |
| RB1 | retinoblastoma 1 | 48 | NM_000321.2 | 1.96 | 0.0001 |
| RUNK3 | runt-related transcription | 49 | NM_001031680.2 | 6.01 | 0.0002 |
| | factor 3 | | | | |
| SMAD4 | SMAD family member 4 | 50 | NM_005359.5 | 1.72 | 0.0019 |
| SOCS3 | suppressor of cytokine | 51 | NM_003955.4 | 6.52 | 0.0003 |
| | signaling 3 | | | | |
| TGFBR2 | transforming growth factor, | 52 | NM_001024847.2 | 3.71 | 0.0025 |
| | beta receptor II | | | | |
| TNFSF10 | tumor necrosis factor | 53 | NM_003810.3 | 3.53 | 0.0003 |
| | (ligand) superfamily, | | | | |
| | member 10 | | | | |
| TP53 | tumor protein p53 | 54 | NM_001126114.2 | 3.91 | 0.0018 |

TABLE 6
Gene expression (down-regulated by C/EBPα-saRNA)

| Gene Symbol | Name | SEQ ID | RefSEQ | Fold Down | p value |
|---|---|---|---|---|---|
| ADAM17 | Disintegrin and | 55 | NM_003183.4 | −2.19 | 0.0007 |
| | metalloproteinase domain- | | | | |
| | containing protein 17 | | | | |
| AKT1 | v-akt murine thymoma | 56 | NM_005163.2 | −1.78 | 0.0220 |
| | viral oncogene homolog 1 | | | | |
| ANGPT2 | angiopoietin 2 | 57 | NM_001147.2 | −1.61 | 0.0097 |
| BCL2 | B-cell CLL/lymphoma 2 | 58 | NM_000633.2 | −2.77 | 0.0177 |
| BCL2L1 | BCL2-like 1 | 59 | NM_138578.1 | −1.77 | 0.0014 |
| BIRC2 | baculoviral IAP repeat | 60 | NM_001256163.1 | −2.83 | 0.0054 |
| | containing 2 | | | | |
| BIRC5 | baculoviral IAP repeat | 61 | NM_001012271.1 | −18.53 | 0.0014 |
| | containing 5 | | | | |
| CCL5 | chemokine ligand 5 | 62 | NM_001278736.1 | −35.10 | 0.0001 |
| CCND1 | cyclin D1 | 63 | NM_053056.2 | −6.45 | 0.0001 |
| CCND2 | cyclin D2 | 64 | NM_001759.3 | −2.40 | 0.0001 |
| CDH1 | cadherin 1, type 1, E- | 65 | NM_004360.3 | −3.04 | 0.0002 |
| | cadherin (epithelial) | | | | |
| CDH13 | cadherin 13 | 66 | NM_001220488.1 | −5.52 | 0.0001 |
| CDKN1A | cyclin-dependent kinase | 67 | NM_001220778.1 | −2.53 | 0.0016 |
| | inhibitor 1A | | | | |
| CDKN1B | cyclin-dependent kinase | 68 | NM_004064.3 | −1.74 | 0.0145 |
| | inhibitor 1B (p27, Kip1) | | | | |
| CDKN2A | cyclin-dependent kinase | 69 | NM_001195132.1 | −6.75 | 0.0001 |
| | inhibitor 2A | | | | |
| CFLAR | CASP8 and FADD-like | 70 | NM_001202519.1 | −7.12 | 0.0003 |
| | apoptosis regulator | | | | |
| CTNNB1 | catenin (cadherin- | 71 | NM_001904.3 | −1.59 | 0.0081 |
| | associated protein), beta 1 | | | | |
| CXCR4 | chemokine receptor 4 | 72 | NM_001008540.1 | −2.73 | 0.0004 |
| E2F1 | E2F transcription factor 1 | 73 | NM_005225.2 | −1.40 | 0.0174 |
| EGF | epidermal growth factor | 74 | NM_001963.4 | −8.63 | 0.0074 |
| EGFR | epidermal growth factor | 75 | NM_005228.3 | −2.58 | 0.0064 |
| | receptor | | | | |
| EP300 | E1A binding protein p300 | 76 | NM_001429.3 | −3.28 | 0.0001 |
| FADD | Fas (TNFRSF6)- | 77 | NM_003824.3 | −1.15 | 0.0001 |
| | associated via death | | | | |
| | domain | | | | |
| FLT1 | fms-related tyrosine kinase | 78 | NM_002019.4 | −36.26 | 0.0001 |
| | 1 | | | | |
| FZD7 | frizzled family receptor 7 | 79 | NM_003507.1 | −2.00 | 0.0004 |
| GSTP1 | glutathione S-transferase | 80 | NM_000852.3 | −1.97 | 0.0019 |
| | pi 1 | | | | |
| HGF | hepatocyte growth factor | 81 | NM_000601.4 | −11.07 | 0.0001 |
| HRAS | Harvey rat sarcoma viral | 82 | NM_176795.3 | −3.69 | 0.0001 |
| | oncogene homolog | | | | |
| IGFBP1 | insulin-like growth factor | 83 | NM_000596.2 | −7.36 | 0.0001 |
| | binding protein 1 | | | | |
| IGFBP3 | insulin-like growth factor | 84 | NM_001013398.1 | −17.56 | 0.0001 |
| | binding protein 3 | | | | |
| IRS1 | insulin receptor substrate 1 | 85 | NM_005544.2 | −1.61 | 0.0010 |
| ITGB1 | integrin beta 1 | 86 | NM_002211.3 | −2.48 | 0.0001 |
| KDR | kinase insert domain | 87 | NM_002253.2 | −13.5 | 0.0001 |
| | receptor | | | | |
| MCL1 | myeloid cell leukemia | 88 | NM_021960.4 | −2.47 | 0.0031 |
| | sequence 1 | | | | |
| MET | met proto-oncogene | 89 | NM_001127500.1 | −1.30 | 0.0247 |
| MSH2 | mutS homolog 2 | 90 | NM_000251.2 | −1.03 | 0.0057 |
| MSH3 | mutS homolog 3 | 91 | NM_002439.4 | −3.63 | 0.0002 |
| MTDH | metadherin | 92 | NM_178812.3 | −1.73 | 0.0014 |
| MYC | v-myc avian | 93 | NM_002467.4 | −1.76 | 0.0132 |
| | myelocytomatosis viral | | | | |
| | oncogene homolog | | | | |
| NKFB1 | nuclear factor of kappa | 94 | NM_003998.3 | −1.48 | 0.0365 |
| | light polypeptide gene | | | | |
| | enhancer in B-cells 1 | | | | |
| NRAS | neuroblastoma RAS viral | 95 | NM_002524.4 | −29.47 | 0.0001 |
| | (v-ras) oncogene homolog | | | | |
| OPCML | opioid binding protein/cell | 96 | NM_001012393.1 | −1.51 | 0.0074 |
| | adhesion molecule-like | | | | |
| PDGFRA | platelet-derived growth | 97 | NM_006206.4 | −1.54 | 0.0019 |
| | factor receptor, alpha | | | | |
| | polypeptide | | | | |
| PIN1 | peptidylprolyl cis/trans | 98 | NM_006221.3 | −1.15 | 0.0012 |
| | isomerase, NIMA- | | | | |
| | interacting 1 | | | | |
| PTGS2 | prostaglandin- | 99 | NM_000963.2 | −2.76 | 0.0001 |
| | endoperoxide synthase 2 | | | | |
| PYCARD | PYD and CARD domain | 100 | NM_013258.4 | −1.49 | 0.0178 |
| | containing | | | | |
| RAC1 | ras-related C3 botulinum | 101 | NM_018890.3 | −1.46 | 0.0069 |
| | toxin substrate 1 | | | | |
| RASSF1 | Ras association | 102 | NM_170714.1 | −4.59 | 0.0001 |
| | (RalGDS/AF-6) domain | | | | |
| | family member 1 | | | | |
| RELN | reelin | 103 | NM_005045.3 | −2.09 | 0.0005 |
| RHOA | ras homolog family | 104 | NM_001664.2 | −1.46 | 0.0019 |
| | member A | | | | |
| SFRP2 | secreted frizzled-related | 105 | NM_003013.2 | −1.73 | 0.0092 |
| | protein 2 | | | | |
| SMAD7 | SMAD family member 7 | 106 | NM_005904.3 | −3.46 | 0.0002 |
| SOCS1 | suppressor of cytokine | 107 | NM_003 745.1 | −7.04 | 0.0001 |
| | signaling 1 | | | | |
| STAT3 | signal transducer and | 108 | NM_139276.2 | −13.06 | 0.0006 |
| | activator of transcription 3 | | | | |
| TCF4 | transcription factor 4 | 109 | NM_001083962.1 | −9.96 | 0.0008 |
| TERT | telomerase reverse | 110 | NM_198253.2 | −1.65 | 0.0005 |
| | transcriptase | | | | |
| TGFA | transforming growth factor | 111 | NM_003236.3 | −9.27 | 0.0001 |
| | alpha | | | | |
| TGFB1 | transforming growth factor | 112 | NM_000660.4 | −1.80 | 0.0002 |
| | beta 1 | | | | |
| TLR4 | toll-like receptor 4 | 113 | NM_003266.3 | −4.81 | 0.0007 |
| TNFRSF10B | tumor necrosis factor | 114 | NM_003 842.4 | −1.07 | 0.0063 |
| | receptor superfamily | | | | |
| | member 10b | | | | |
| VEGFA | vascular endothelial | 115 | NM_001171623.1 | −1.30 | 0.0429 |
| | growth factor A | | | | |
| WT1 | Wilms tumor 1 | 116 | NM_024426.4 | −6.674 | 0.0010 |
| XIAP | X-linked inhibitor of | 117 | NM_001167.3 | −2.93 | 0.0228 |
| | apoptosis | | | | |
| YAP1 | Yes-associated protein 1 | 118 | NM_001130145.2 | −1.58 | 0.0058 |

[0382] Growth arrest and DNA-damage-inducible, 45 beta (GADD45B), also up-regulated, is a member of the growth arrest DNA damage inducible gene family associated with cell growth control where together with p53 induces hepatoprotection in HepG2 cells. Deleted in Liver Cancer 1 (DLC1) gene is a reported tumor suppressor for human liver cancer inhibiting cell growth and proliferation, as well as inducing apoptosis. The data suggests that DLC1 is up-regulated in C/EBPα-saRNA transfected HepG2 cells (Table 7).

TABLE 7
Up-regulation of tumor suppressor genes by C/EBPα-saRNA

| Gene | SEQ | | | |
|---|---|---|---|---|
| Symbol | ID | Gene Function | Fold Up | p value |
| BAX | 35 | Apoptosis | 1.12 | 0.0027 |
| BID | 36 | | 13.58 | 0.0001 |
| CASP8 | 37 | Apoptosis, angiogenesis | 6.69 | 0.0000 |
| DLC1 | 39 | Apoptosis, Ras/Raf/MEK/ | 4.84 | 0.0001 |
| FAS | 40 | ERK, small GTPase-mediated | 1.64 | 0.0004 |
| FHIT | 41 | signaling | 2.84 | 0.0021 |
| GADD45B | 42 | Apoptosis, cell cycle | 3.35 | 0.0001 |
| RUNX3 | 49 | | 6.01 | 0.0002 |
| SOCS3 | 51 | Apoptosis, adhesion & | 6.52 | 0.0003 |
| TNFSF10 | 53 | proteolysis | 3.53 | 0.0003 |
| PTEN | 46 | Cell cycle, PI3K/AKT, | 1.28 | 0.0013 |
| | | adhesion & proteolysis, | | |
| | | angiogenesis | | |
| RB1 | 48 | Cell cycle, classical WNT, | 1.96 | 0.0001 |
| | | Ras/Raf/MEK/ERK, small | | |
| | | GTPase-mediated sigalling | | |
| IGF2 | 44 | Cell cycle, IGF/IGFR | 9.75 | 0.0001 |
| | | signalling | | |
| P53 | 54 | DNA damage, Ras/Raf/MEK/ | 3.91 | 0.0018 |
| | | ERK, small GTPase-mediated | | |
| | | sigalling | | |
| DAB2IP | 38 | Small GPTase-mediated | 2.59 | 0.0042 |
| | | signalling | | |
| HHIP | 43 | Hedgehog signalling | 1.59 | 0.0054 |
| SMAD4 | 50 | TGFβ signalling, epithelial | 1.72 | 0.0019 |
| | | to mesenchymal transition | | |
| TGFBR2 | 52 | TGFβ signalling, angiogenesis | 3.71 | 0.0025 |

[0383] Runt-related transcription factor-3 (RUNX3) is a member of the runt domain family of transcription factor and has been frequently been observed in HCC where its expression is significantly lower than in surrounding normal tissue. Since ectopic expression of RUNX3 reverses epithelial-mesenchymal transition (EMT) in HCC cells, it was also observed, in the C/EBPα-saRNA transfected HepG2 cells, an up-regulation of RUNX3 (Table 6) and down-regulation of 4 genes involved in EMT. These included CTNB1 (encoding β-atenin), Hepatocyte growth factor (HGF), Small body size mothers against decapentaplegic homolog 7 (SMAD7), and Transforming factor beta 1 (TGFBT1) (Table 8).

[0384] Suppression of cytokine signaling 3 (SOCS3) was also detected. SOCS3 is a member of the STAT-induced STAT inhibitor (SSI) which functions as negative regulators of cytokine signaling. Decreased expression of SOCS3 is correlated with increased phosphorylation of STAT3 in HCC. SOCS3 furthermore has been implicated in negatively regulating cyclin D1 (CCND1), and anti-apoptotic genes including XIAP, survivin (BIRC5), and myeloid leukaemia cell differentiation protein (MCL1). Here, a significant increase in expression of SOCS3 (Table 7) and a significant decrease in STAT3, CCND1, XIAP, BIRC5 and MCL1 expression (Table 8) were observed. The array data also confirmed down-regulation in expression of GSTP1 (Table 8).

[0385] Overall, the down-regulated genes were strongly enriched for functions related to negative regulation of apoptosis and cell death (gene ontology (GO) terms GO:0043066 and GO:0060548; p-values 2×10⁻⁹ and 2×10⁻⁹, respectively), whereas the up-regulated genes were enriched for functions related to positive regulation of cell differentiation (GO:0045597; p=5×10⁻³). Consequently, the data suggest that control of C/EBPα levels and signals may be therapeutic intervention points in liver cancer.

TABLE 8
Analysis of genes down-regulated by C/EBPα-saRNA

| Gene | SEQ | | | |
|---|---|---|---|---|
| Symbol | ID | Gene Function | Fold Up | p value |
| CCND1 | 63 | Classical Wnt, cell cycle, | −6.45 | 0.0001 |
| | | DNA damage | | |
| CDKN2A | 69 | Classical Wnt, Ras/Raf/ | −6.75 | 0.0001 |
| | | MEK/ERK & Small GTPase- | | |
| | | mediated signalling, | | |
| | | cell cycle | | |
| CTNNB1 | 71 | Classical Wnt, epithelial | −1.59 | 0.0081 |
| | | to mesenchymal transition | | |
| | | (EMT), angiogenesis | | |
| FZD7 | 79 | Classical Wnt | −2.00 | 0.0004 |
| MTDH | 92 | | −1.73 | 0.0014 |
| PINI | 98 | | −1.15 | 0.0012 |
| TCF4 | 109 | | −9.96 | 0.0008 |
| SMAD7 | 106 | TGFβ signalling, EMT, | −3.46 | 0.0002 |
| | | adhesion & poteolysis | | |
| TGFB1 | 112 | TGFβ signalling, EGFR | −1.80 | 0.0002 |
| | | signalling, EMT, immune & | | |
| | | inflammatory response | | |
| AKT1 | 56 | P13K/AKY signalling, | −1.78 | 0.0220 |
| | | adhesion & proteolysis | | |
| IRS1 | 85 | P13K/AKY signalling | −1.61 | 0.0010 |
| IGFBP1 | 83 | IGF/IGFR signalling | −7.36 | 0.0001 |
| IGFBP3 | 84 | | −17.56 | 0.0001 |
| IRS1 | 85 | | −1.61 | 0.0010 |
| YAP1 | 118 | Hippo signaling | −1.58 | 0.0058 |
| CDKN1A | 67 | Ras/Raf/MEK/ERK & small | −2.53 | 0.0016 |
| | | GTPase-mediated signalling, | | |
| | | cell cycle, CDKN1A | | |
| HRAS | 82 | Ras/Raf/MEK/ERK & small | −3.69 | 0.0001 |
| NRAS | 95 | GTPase-mediated signalling | −29.47 | 0.0001 |
| RAC1 | 101 | Ras/Raf/MEK/ERK & small | −1.46 | 0.0069 |
| RHOA | 104 | GTPase-medicated signalling, | −1.46 | 0.0019 |
| | | immune & inflammatory | | |
| | | response, adhesion & | | |
| | | proteolysis | | |
| RASSF1 | 102 | Ras/Raf/MEK/ERK & small | −4.59 | 0.0001 |
| | | GTPase-medicated signalling, | | |
| | | cell cycle | | |
| ADAM17 | 55 | EGFR signalling, | −2.19 | 0.0007 |
| | | adhesion & proteolysis | | |
| CDH13 | 66 | EGFR & small GTPase- | −5.52 | 0.0001 |
| | | mediated signalling, | | |
| | | adhesion & oroteolysis, | | |
| | | angiogenesis | | |
| EGF | 74 | EGFR signalling, angiogenesis | −8.63 | 0.0074 |
| EGFR | 75 | EGFR signalling, | −2.58 | 0.0064 |
| | | adhesion & proteolysis | | |
| TGFA | 111 | EGFR signalling | −9.27 | 0.0001 |
| HGF | 81 | MET/HGF signalling, EMT | −11.07 | 0.0001 |
| MET | 89 | MET/HGF signalling | −1.30 | 0.0247 |
| RELN | 103 | Small GTPase-mediated | −2.09 | 0.0005 |
| | | signalling, adhesion & | | |
| | | proteolysis | | |
| CDKN1B | 68 | Cell cycle | −1.74 | 0.0145 |
| MYC | 93 | | −1.76 | 0.0132 |
| E2F1 | 73 | Cell cycle, apoptosis | −1.40 | 0.0174 |
| EP300 | 76 | Cell cycle, apoptosis, | −2.09 | 0.0005 |
| | | adhesion & proteolysis | | |
| BCL2 | 58 | Apoptosis | −2.77 | 0.0177 |
| BCL2L1 | 59 | | −1.77 | 0.0014 |
| BIRC2 | 60 | | −2.83 | 0.0054 |
| BIRC5 | 61 | | −18.53 | 0.0014 |
| FADD | 77 | | −1.15 | 0.0001 |
| GSTP1 | 80 | | −1.97 | 0.0019 |
| MCL1 | 88 | | −2.47 | 0.0031 |
| TERT | 110 | | −1.65 | 0.0005 |
| TNFRSF10B | 114 | | −1.07 | 0.0063 |
| WT1 | 116 | | −6.674 | 0.0010 |
| CFLAR | 70 | Apoptosis, adhesion & | −7.12 | 0.0003 |
| | | proteolysis | | |
| MSH2 | 90 | Apoptosis, DNA damage | −1.03 | 0.0057 |
| PYCARD | 100 | Apoptosis, adhesion & | −1.49 | 0.0178 |
| | | proteolysis | | |
| CCL5 | 62 | Immune & inflammatory | −35.1 | 0.0001 |
| CXCR4 | 72 | response | −2.73 | 0.0004 |
| NKFB1 | 94 | | −1.48 | 0.0365 |
| PTGS2 | 99 | | −2.76 | 0.0001 |
| TLR4 | 113 | | −4.81 | 0.0007 |
| CDH1 | 65 | Adhesion & proteolysis | −3.04 | 0.0002 |
| EGFR | 75 | | −2.58 | 0.0064 |
| EP300 | 76 | | −3.28 | 0.0001 |
| HGF | 81 | | −11.07 | 0.0001 |
| ITGB1 | 86 | | −2.48 | 0.0001 |
| OPCML | 96 | | −1.51 | 0.0074 |
| SOCS1 | 107 | | −7.04 | 0.0001 |
| TERT | 110 | | −1.65 | 0.0005 |
| ANGPT2 | 57 | Angiogenesis | −1.61 | 0.0097 |
| FLT1 | 78 | | −36.26 | 0.0001 |
| KDR | 87 | | −13.5 | 0.0001 |
| PDGFRA | 97 | | −1.54 | 0.0019 |
| VEGFA | 115 | | −1.30 | 0.0429 |

Transfection of C/EBPα-saRNA in HepG2 Suppresses STAT3, IL6R and cMyc in HepG2 Cells

[0386] Previously published reports demonstrate that interleukin 6 receptor (IL6R) promote hepatic oncogenesis by directly activating signal transducer and activator of transcription 3 (STAT3) and, in turn, up-regulating expression of c-Myc. Since a ChIP-Seq analysis of these 3 genes showed the presence of C/EBPα binding sites within their promoter regions, the inventors interrogated whether transfection of a C/EBPα-saRNA in HepG2 cells would affect expression levels of these three factors.

[0387] A significant reduction in mRNA levels of STAT3 (FIG. 8A), cMyc (FIG. 8B) and IL6R (FIG. 8C) was observed when compared to untransfected cells. HepG2 cells were transfected with either C/EBPα-saRNA or Scramble-saRNA at 20 nM final concentration. After three sets of transfections, cells were harvested for total RNA extraction and genomic DNA removal. Following reverse transcription of mRNA, quantitative PCR analysis was performed to detect transcript levels of STAT3, MYC and IL6R. This trend in gene reduction was also observed for MYC and STAT in our previously described gene expression array (Table 5). When the methylation status of the CpG islands at the promoter regions of STAT3 (FIG. 9A), MYC (FIG. 9B) and IL6R (FIG. 9C) were assessed using EPITECT™ Methyl II PCR assay (QIAGEN), an increase in methylation state at the promoters of all three genes was detected. A Western blot also confirmed a reduction in the phosphorylation status of STAT3 at residues 705 and 727 and in the protein level of IL6R (FIG. 9D). Collectively, it was shown that in vivo delivery of C/EBPα might have a positive effect in assisting liver function and decreasing aberrant cell proliferation in a cirrhotic/HCC setting.

[0388] In summary, the well-known anti-proliferative effects of C/EPBα were confirmed in a clinically relevant cirrhotic/HCC model. In addition to regulating known targets of C/EPBα that control cell proliferation it was demonstrated, using a liver cancer specific gene array, that C/EPBα targets numerous other oncogenes and tumor suppressor genes. Modulation of C/EPBα-saRNA therefore may have a profound effect at the transcriptional level for treating liver cancer. Currently, most therapeutic disciplines such as surgery, chemotherapy, radiotherapy and biologics are associated with variable decrease of liver dysfunction. The data presented here offer a new approach to targeting liver cancer cells.

### Example 2. C/EBPα-saRNA-Dendrimer Gene Expression Analysis

[0389] C/EBPα expression in Huh7 liver cell line was tested with control, C/EBPα-saRNA alone, different dendrimers, and C/EBPα-saRNA-dendrimers with different C/EBPα-saRNA:dendrimer ratios. Clinical grade C/EBPα-saRNA was used for transfection. Results in FIG. 10 show that the C/EBPα gene expression was only increased with C/EBPα-saRNA-dendrimers.

### Example 2b. saRNA Dendrimer Stability

[0390] The stability of C/EBPα-saRNA-dendrimers was also tested. C/EBPα-saRNA-dendrimers were incubated at room temperature for 1 hr, 12 hr, 24 hr and 48 hr prior to transfection to HepG2 cells. Transcript levels of C/EBPα mRNA were then measured following 3× doses of 5 nmol C/EBPα-saRNA-dendrimer at each time points as shown in FIG. 11. Optimal effect was observed at hr. This is reduced by at least 50% between 12 and 24 hours. At 48 hours, C/EBPα-saRNA-dendrimers lost most of their stability.

[0391] Serum albumin levels were tested for a week in mice after injection of C/EBPα-saRNA-dendrimer complexes. Results are shown in FIG. 12. Each group comprises 5 mice. Group 1 had no treatment and the serum albumin levels were tested on the first day. Group 2 had no treatment and the serum albumin levels were tested on the 8th day. Group A was treated with 3× doses of 5 nmol of C/EBPα-saRNA-dendrimers at a concentration of 0.1 nmol/uL, and the serum albumin levels were tested on the 2nd day. Group B, C, and D all were treated with the same amount of C/EBPα-saRNA-dendrimers and the serum albumin levels were tested on the 3^{rd}, 5^{th} and 8th days, respectively. The serum albumin levels of Group A, B, C, and D were higher than Group 2, demonstrating that the effect of C/EBPα-saRNA-dendrimers lasted until at least the 8th day after administration.

### Example 3. C/EBPα-saRNA-Dendrimer Drug Targeting In Vivo in Normal Animals

[0392] To assess the biochemical effect of intravenous injection of C/EBPα-saRNA in mice in the absence of liver disease, circulating serum for liver specific factors was analyzed and histopathological changes in hepatocytes of C/EBPα-saRNA injected mice v.s. control mice were studied.

[0393] Ten Male C57Bl6/J, 8 week old mice were used for the experiment (Control group N=5). Approval was obtained from Institutional and Regional Regulatory bodies and all procedures were in compliance with standing National Regulations. 5 nmol of C/EBPα-saRNA at a concentration of 0.1 nmol/uL was reconstituted to a total volume of 100 uL with RNase/Dnase free H₂O. 50 uL of complex A (C/EBPα-saRNA) and 50 uL of complex B (INVIVOFECTAMINE, INVITROGEN, CA, USA) were mixed, incubated at 50° C. for 30 minutes and the resulting mixture was used for tail vein injections. Control animals were injected with equal volume of PBS while a positive control animal received siRNA against Factor VII; a total of 5 control and 5 experimental animals were injected.

[0394] In the absence of liver disease, injection of C/EBPα-saRNA caused a significant increase in circulating levels of albumin and unconjugated bilirubin levels indicating increased liver function. Serum levels of alanine transaminase (ALT), aspartate aminotransferase (AST) and gamma glutamyl transpeptidase (GGT) decreased in C/EBPα-saRNA injected mice.

[0395] Pathological examination of liver biopsies stained with hematoxylin and eosin was conducted. No discernible or prominent morphological differences between the control and treated group were observed. In general, the architecture of the liver acini was preserved. There was no significant portal inflammation or fibrosis following injection of C/EBPα-saRNA. The bile ducts appeared normal in both groups and there were no trace of foci or oval cell proliferation or foci of hepatic necroinflammatory activity.

[0396] The central venules and sinusoids appeared normal in both groups. There were no morphological evidence to suggest that Kuppfer cells were activated nor were there signs of vascular or endothelial alterations. There were no visible evidence of cell injury including ballooning and steatosis. There were no findings suggestive of increased hepatocellular proliferation (mitoses, thickened plates or nuclear crowding). One consistent observation, however, was the more compact and slightly more basophilic cytoplasm in the zone 1 of the C/EBPα-saRNA treated group. Zone 1 is regarded as an area preferential for albumin synthesis in the liver.

### Example 4. C/EBPα-saRNA-Dendrimer Acute Toxicity Study

[0397] The effect of increasing the concentration of C/EBPα-saRNA-dendrimers injections to animals was studied.

[0398] The study was performed in the animal facility of the Center for Experimental Surgery of the Biomedical Research Foundation of the Academy of Athens and was evaluated and authorized by the Veterinary Service of the Prefecture of Athens (permit no. 414/07-02-2013), as required by the Greek legal requirements for animal experimentation.

### Animals

[0399] Thirty one male Wistar outbred rats (HsdOla:WI), bred in the animal facility of the Center from animals purchased from Harlan Laboratories (Blackthorn, UK) with a mean body weight 303.3±28.5 g (mean±1 SD) and aged 12-14 weeks old, were used in the study. The animals were kept under standard conditions, fed standard rat food (Teklad 2918, Harlan, Udine, Italy) and given tap water ad libitum according to the Guide for the Care and Use of Laboratory Animals and the relevant recommendations of the European Commission on the care and use of laboratory animals.

[0400] All rats in the facility were screened regularly by using a health monitoring program, in accordance to the Federation of European Laboratory Animal Science Associations' recommendations, and were free from a wide range of pathogens including Kilham rat virus, rat parvovirus, Toolan H1 virus, Sendai virus, pneumonia virus of mice, reovirus type III, murine encephalomyelitis virus, sialodacryoadenitis virus, rat minute virus, Hantaan virus, lymphocytic choriomeningitis virus, cilia-associated respiratory Bacillus, mouse adenovirus types 1 and 2, rat rotavirus, rat coronavirus, Mycoplasma pulmonis, Clostridium piliforme, Bordetella bronchiseptica, Pasteurella spp., fur mites, and pinworms.

### Methods

[0401] Animals were randomized into four groups, consisting of 10 animals for the control group (group C) and 7 animals for all the other groups. In the control group, 100 μL of PBS was administered in animals via the tail vein. Dosing solutions of 100 μL of standard, 2× and 3× of C/EBPα-saRNA-dendrimers at a concentration of 0.1 nmol/uL in PBS were administered in animals of group 1×, 2× and 3× respectively. Injections were repeated every other day for three consecutive times.

[0402] Body weight of the animals was measured at the beginning and the end of the procedure just before the euthanasia.

[0403] Three days after the last C/EBPα-saRNA-dendrimer injection the rats were anesthetized using an inhalation anesthetic (isoflurane) and blood was collected from caudal vena cava.

### Blood Assays

[0404] 3 ml of blood sample were collected in tubes for the measurement of gamma-glutamyl transpeptidase (GGT), serum glutamic-oxaloacetic transaminase (SGOT), serum glutamic-pyruvic transaminase (SGPT), alkaline phosphatase (ALP), total bilirubin, direct bilirubin, creatinine, urea, albumin and total cholesterol serum levels at the end of each group experimental period. The collected blood was centrifuged at 3000 rpm for 10 min and the serum was analyzed in a biochemical analyzer (Chemwell 2910, Awareness Technology Inc., Palm City, FL, USA) by enzymatic colorimetric methods using commercial kits (Human, Germany).

[0405] Another 3 ml of blood samples were collected in tubes for hematological analysis using an hematology analyzer (MEK 6318, Nihon-Kohden, Tokyo, Japan).

### Histological Analysis

[0406] At necropsy liver, spleen and kidney from each animal were collected and fixed in 10% formalin. Following fixation, specimens were processed routinely (dehydration through graded ethanol solutions and clearance in xylene solution), embedded in paraffin, sectioned at 5 μm and stained with Hematoxylin-Eosin (H-E).

### Statistical Analysis

[0407] GraphPad Prism for Windows was used for the statistical analyses. One-way analysis of variance and Bonferroni's multiple comparison test were used to compare the differences from the administration of different doses of C/EBPα-saRNA-dendrimers. All variables are expressed as mean±SD. Values of p<0.01 were considered to indicate statistical significance.

### Results

[0408] There was no mortality caused during the injections of the solution. No alteration of body weight or cholesterol was noticed among groups. Treatment of the animals with doses of 100 uL, 200 uL and 300 uL of 0.1 nmol/uL C/EBPα-saRNA-dendrimer did not have any influence on haemoglobin (Hb) levels (normal range 16 g/dL). Treatment with increasing dose of C/EBPα-saRNA-dendrimer did not alter white blood cell (WBC) count away from values in the control group. Treatment with increasing dose of C/EBPα-saRNA-dendrimer did not alter blood platelet count away from the control group. Treatment with the highest dose (3× doses) did however show reversion of platelet counts closer to ‘normal range’ as defined by Harlan Laboratory parameters.

[0409] Biochemical analysis for liver function revealed that gamma glutamyl transpeptidase (GGT) levels from C/EBPα-saRNA-dendrimer treated groups at all dose levels were closer to the normal range (as defined by Harlan parameters) when compared to control. This suggests an improvement in liver function within the treated groups. Serum glutamic oxaloacetic transaminase (SGOT) or aspartate transaminase (AST) levels showed no changes in the treated groups relative to the control group. Serum glutamic pyruvate transaminase (SGPT) or alanine transaminase (ALT) levels were closer to the normal range in 1× and 2×C/EBPα-saRNA-dendrimer treated animals. Levels in the 3×C/EBPα-saRNA-dendrimer treated group were comparable to the control group. Circulating levels of alkaline phosphatase (ALP) showed no differences between control and treated groups. Circulating levels of unconjugated bilirubin in the treated animals did not alter away from the normal range. Urea and creatinine levels were used to evaluate kidney function. No changes were observed between control and treated animals.

[0410] Therefore, the data show that C/EBPα-saRNA-dendrimer molecules can positively regulate liver function with no evidence of associated toxicity.

[0411] Administration of C/EBPα-saRNA-dendrimer increasing dose from 1× to 3× did not impact on liver, spleen or kidney histological appearance, either. Liver specimens collected from animals of the 1×, 2× or 3× group did not present altered cytoarchitecture when compared with the control group. Lobular architecture could not be clearly observed due to smaller liver size and decreased amount of connective tissue (species characteristic). Apart from a mild hyperemia however, there were no other lesions (such as fatty infiltration, inflammation or necrosis) observed.

[0412] Kidney histology did not present changes between experimental and control groups. All specimens presented normal renal corpuscles and typical proximal and distant tubule epithelial lining. No inflammatory or degenerative lesions were observed except for a mild hyperemia (like the liver specimens) both in glomerular and peritubular capillaries and interlobular vessels.

[0413] Spleen microscopic evaluation (just as liver and kidney) did not show abnormal tissue architecture. All groups presented normal white pulp with easily observable lymphatic nodules and periarterial lymphatic sheaths. All animals however presented hyperemic red pulp. Hyperemia is present even close to the germinal centers of splenic nodules (aka marginal zone). Additionally, large vessels were filled with red blood cells indicating overall splenic congestion.

[0414] The data support an overall profile of safety and efficacy of C/EBPα-saRNA in the treatment of patients with liver failure with or without liver cancer.

### Example 5. Cell Proliferation Assays of Cancer Cells Treated with C/EBPα-saRNA

[0415] C/EBPα-saRNA was tested on a panel of cell lines representing well-differentiated and undifferentiated cancer types. WST-1 cell proliferation assays were performed on fibroblasts, HL60 (acute myeloid leukemia (AML)). K562 (chronic myeloid leukemia (CML)), Jurkat (acute T cell lymphoma), U937 (histiocytic lymphoma), U373 (glioblastoma), 32DZ210 (myeloid leukemia) shown in FIG. 13, and HepG2 (human HCC), rat liver cancer cells, Panc1 (human pancreatic epitheloid carcinoma), MCF7 (human breast adenocarcinoma), DU145 (human metastatic prostate cancer), and MIN6 (rat insulinoma) shown in FIG. 15. These cells were treated with 20 nM of C/EBPα-saRNA in 3× doses at 2 hr, 48 hr, and 72 hr. Cell proliferation was measured and the results are shown in FIGS. 14 and 16. The results demonstrate excellent inhibition of 32Dp210 (myeloid leukemia), U373 (glioblastoma), K562 (CML), Jurkat (acute T cell lymphoma), DU145 (human metastatic prostate cancer), panc1 (human pancreatic carcinoma), rat liver cancer cells, HepG2, and MCF7 (human breast cancer).

[0416] The involvement of C/EBPα-saRNA in ovarian cancer was tested on cisplatin-sensitive PEO1 cells and cisplatin-resistant poorly-differentiated PEO4 cells. PEO1 and PEO4 cells are in vivo derived isogenic cell line pairs. Cells were seeded and transfected three times with 20 nM C/EBPα-saRNA and scramble saRNA control. WST-1 assay was performed at 16 h, 24 h, 48 h, 72 h, and 96 h. C/EBPα-saRNA decreases the cell survival in both cisplatin-sensitive (PEO1) and resistant (PEO4) ovarian cancer cells.

[0417] In addition, WST-1 cell proliferation assays demonstrated inhibition of small cell lung carcinomas and pancreatic adenocarcinomas when compared to treatment with scramble saRNA controls. In contrast, C/EBPα-saRNA was not, however, as effective in suppressing proliferation in well-differentiated rat insulinoma. C/EBPα-saRNA only reduced the proliferation of well-differentiated breast cancer (MCF7) cell lines for 31%. Comparison of endogenous levels of C/EBPα using qPCR and Western blots showed that undifferentiated tumor cell lines expressed lower levels when compared to well-differentiated lines. Data not shown here.

[0418] The results presented here suggest that C/EBPα-saRNA could be an important factor for treating tumors of various degrees of differentiation. Furthermore, it could potentially be used to select patients that could benefit from this novel therapy.

### Example 6. C/EBPα-saRNA and C/EBPβ-siRNA Combinations in Treating Tumors

[0419] In this study, a CEBPα-saRNA of the present invention was administered with an siRNA that inhibits C/EBPβ gene expression. HepG2 cell proliferation and MCF7 cell proliferation were quantified at 16, 24, 48, 72, 96 and 120 hours, respectively, following C/EBPα-saRNA+C/EBPβ-siRNA transfection by mitochondrial dehydrogenase expression analysis, using WST-1 reagent following the manufacturer's guideline. Cell proliferation with 20 nM scramble siRNA, 50 nM scramble saRNA, 20 nM scramble siRNA+50 nM scramble saRNA, 20 nM C/EBPβ-siRNA alone, and 50 nM C/EBPα-saRNA alone were also tested. For HepG2 cells, C/EBPα-saRNA alone and C/EBPα-saRNA+C/EBPβ-siRNA both inhibit tumor cell proliferation. For MCF7 cells, C/EBPα-saRNA+C/EBPβ-siRNA reduced cell proliferation by 50% at 120 hr. Therefore, C/EBPα-saRNA combined with C/EBPβ-siRNA is a promising therapeutic agent for treating HCC and breast cancer.

### Example 7. C/EBPα-saRNA Regulates miRNA Levels

[0420] The correlation between miRNAs and progression and prognosis of cancer has recently been evaluated in several studies. For HCC, some miRNAs have been extensively studied since their initial discovery (e.g., miR-21 or miR-122). However a huge number of miRNAs are actually implicated in cancer development and progression. miRNAs and cancer are strongly related and they might be used for specific gene therapy of cancer. The aim of this study was to evaluate the potential anticancer effect of C/EBPα-saRNA by regulation of miRNA expression.

[0421] HepG2 cells were cultured and treated with 20 nM final concentration of C/EBPα-saRNA. miRNA expression levels were detected by microarray and verified by Real-time-PCR in both groups. For animal experiments, a clinically relevant rat liver tumor model was used and animals were treated with 0.1 nmol/uL of C/EBPα-saRNA-dendrimers via tail vein injections. Control animals were injected with equal volumes of PBS or scramble-saRNA.

[0422] The experimental procedures conducted in the present study are described below.

[0423] The two strands of the C/EBPα-saRNA were annealed using 50 mM Tris-HCl, pH8.0, 100 mM NaCl and 5 mM EDTA following a denaturation step at 90° C. followed by a gradual anneal step to room temperature. C/EBPα-saRNA was transfected into HepG2 and rat liver epithelial cell lines and total RNAs were isolated form cell.

Isolation of Mature miRNA from Cell Lines

[0424] Cell pellets were lysed using a phenol/guanidine based lysis buffer and separated into aqueous and organic phase using chloroform. The miRNA-enriched fraction was then separated from the total RNA following the manufacturer's protocol (miRNeasy MiniKit, QIAGEN, Germantown, MD).

Mature miRNA Microarray Profile

[0425] The Human Cancer PATHWAYFINDER MISCRIPT™ miRNA PCR array (QIAGEN/SA BIOSCIENCES-MIHS102ZA) was used to profile the expression of 84 miRNAs differentially expressed in tumors versus normal tissues. 500 ng of purified RNA was reverse transcribed for 15 minutes with MISCRIPT® RT2 kit (QIAGEN) using MISCRIPT HISPEC Buffer (QIAGEN) for efficient reverse transcription of small nucleolar RNAs (snoRNAs) and small nuclear RNAs (snRNAs). The cDNA was then transferred into the miScript miRNA PCR array plates for amplification in a 7900HT Applied Biosystems Real Time cycler using miScript Universal Primer (QIAGEN) and QuantiTect SYBR Green PCR Master Mix (QIAGEN) at 1 cycle for 10 min at 95° C. and 40 cycles (15 secs at 95° C. and 1 min at 60° C.) for fluorescence data collection.

[0426] The threshold cycle for each well was manually calculated and exported for data analysis and clustering using SABiosciences array specific Data Analysis Software (QIAGEN, Germantown, MD). Gene ontology (GO) enrichment analyses

[0427] The database for annotation, visualization and integrated discovery (DAVID, NIAID, NIH, Bethesda, MD) tool was used to identify functional categories significantly enriched among up-regulated and down-regulated genes.

### MicroRNA Target Analyses

[0428] TARGETSCAN total context score prediction data were downloaded from the TARGETSCAN website [Grimson et al., Cell Press, vol. 27, 91-105 (2007), the contents of which are incorporated herein by reference in their entirety]. For each gene in the TARGETSCAN database, the total sum of context scores for all up-regulated miRNAs was computed. Similarly, for each gene, the total sum of context scores for all down-regulated miRNAs was computed. Finally, for a given gene, the predicted contribution of the up-regulated miRNAs compared with the down-regulated miRNAs was the gene's rank in the sum context scores distribution for the up-regulated miRNAs minus the gene's rank in the sum context scores distribution for the down-regulated miRNAs. Genes that had and absolute change in their relative rank by more than 0.4 were considered to be strongly affected by the up-regulated or down-regulated miRNAs.

### Results

[0429] Cancer miRNA Analysis Suggests C/EBPα-saRNA Mediated Deregulation of miRNAs Involved in Liver Cancer.

[0430] To study the potential contribution of aberrant miRNA regulation in C/EBPα-saRNA transfected cells, the expression of 84 cancer specific mature miRNAs was profiled.

[0431] The expression pattern varied greatly between treated and untreated cells. Overall tumor suppressor miRNAs were upregulated whilst oncogenic miRNAs were suppressed (Table 9).

[0432] miRNA target predictions indicated that most of the differentially expressed mRNAs identified were regulated by several of the differentially expressed miRNAs. To identify which of the mRNAs were most likely to be affected by the altered miRNA expression, mRNAs that were predicted to be most strongly targeted by up-regulated miRNAs compared with the down-regulated miRNAs were identified. One down-regulated (BIRC2) and three up-regulated (RUNX3, PTK2, FHIT) genes were predicted to be the most affected by the down-regulated miRNAs. In contrast, four down-regulated genes (BIRC5, CCL5, CDKN2A, FADD and RAC1) were predicted to be the most affected by the up-regulated miRNAs, which included miR-122 (BIRC5 and CCL5) and miR-134 (CDKN2A and FADD). miR-122 is a liver specific miRNA known to modulate lipid metabolism, hepatitis C virus replication and inhibit apoptosis. miR122 is normally detected during liver specialization into the adult liver. The loss of miR-122 expression is implicated in promoting intrahepatic metastasis of liver tumors where its ectopic restoration has significant effects in reducing cell migration, invasion and in vivo tumorigenesis.

[0433] Since miR-122 is normally repressed in HCC, it was of note that its expression increased following transfection of C/EBPα-saRNA in HepG2 cells (Table 10). miR-122 negatively regulates multiple target genes including A-Distintegrin and A-Metalloproteinase 17 (ADAM17). Increased expression of ADAM17 plays a key role in the development of HCC. Transcription profiling analysis showed that ADAM17 was repressed in C/EBPα-saRNA transfected HepG2 cells. This has important implications for the molecular pathology of cancer cells as ADAM17 cleaves membrane tethered receptors involved in controlling cellular proliferation, migration and apoptosis. Therefore, results suggest that C/EBPα-saRNA may regulate cell proliferation, migration and apoptosis through regulating miRNA-122.

[0434] miR-134 was also up-regulated following transfection of C/EBPα-saRNA. miR-134 has previously been reported as being modulated by members of the p53/p73/p63 family as part of a miRNA tumor suppressor network. Functional studies in non-small cell lung carcinoma demonstrated that increased levels of miR-134 inhibit epithelial to mesenchymal transition (EMT). [Bloominathan, PLoS One, vol. 5, e10615 (2010), the contents of which are incorporated herein by reference in their entirety] A recent study has demonstrated that miR-134 exerts a dramatically suppressive effect on HCC malignancy by downregulating the onco-protein KRAS. miR-134 markedly diminished HCC tumorigenicity and displayed a significant antitumor effect in vivo. In addition, inhibition of endogenous miR-134 partially reversed the suppressive effects of HNF4α on KRAS expression and HCC malignancy. Although the function of miR-134 or its target has yet to be completely elucidated in HCC, the reduced levels of HGF and SMAD7 transcripts, genes associated with EMT, provide a plausible mechanism of action for the detected therapeutic potential of C/EBPα-saRNA.

C/EBPα-saRNA Controlled miRNAs Involved in Cell Differentiation and Proliferation

[0435] In HCC, several miRNAs have been shown to be involved in the gain of anti-apoptotic properties of cancer cells. miR-100, miR-122, miR-134 and miR-140-5p are normally downregulated in HCC; they control cell growth and cell proliferation. Additionally, miR-122 and miR-140-5p have been reported to regulate hepatocytic differentiation. It has been determined here that C/EBPα induces expression of these pro-apoptotic miRNAs in HepG2 treated cells.

[0436] miR-372 functions as an oncogene in HCC since it promotes cell proliferation, invasion and migration. In the present studies, miR-372 was downregulated by C/EBPα-saRNA.

[0437] Contrary to published results, it was found that miR-125b was downregulated by C/EBPα-saRNA, while it has been reported in previous studies that it might suppress cell growth and its high expression might correlated to longer survival of HCC patients.

C/EBPα-saRNA Regulated microRNAs Involved in the Epithelial-Mesenchymal Transition of Cancer Cells.

[0438] miR-124 has been reported to inhibit epithelial mesenchymal transition (EMT). EMT-like event during tumor progression and malignant transformation confers the incipient cancer cells with invasive and metastatic properties. miR-124 is normally downregulated in HCC. It was found herein that miR-124 is up-regulated by C/EBPα-saRNA.

[0439] Further, it was found that miR-191 was up-regulated by C/EBPα-saRNA, while miR-148a was down-regulated by C/EBPα-saRNA. However, it has been reported in the literature that miR-191 is up-regulated in HCC and induces EMT, whilst miR-148a is downregulated in HCC, controlling differentiation and inhibiting EMT. Therefore, results suggest that C/EBPα-saRNA may be able to regulate EMT of cancer cells through regulating miR-124 and miR-191.

C/EBPα-saRNA Regulated miRNAs Involved in the Metastatic Process

[0440] The metastatic process arises from invasion of cancer cells into the circulation. Different miRNAs control in normal cells or promote in cancer cell motility, invasiveness and metastasis. It has been shown here that a C/EBPα-saRNA had a positive effect on most miRNAs involved in the metastatic process. C/EBPα-saRNA restored miRNAs able to inhibit invasiveness of cancer cells (miR-23b, miR-100, miR-122, miR-140-5p, let-7g) and suppressed the levels of pro-metastatic miRNAs (miR-17-5p, miR-21, miR-372). (Table 9) On the other hand, it was found that miR-10b was upregulated in HepG2 treated cells. It has been reported in the literature that it is normally upregulated in HCC and its expression correlates with poor prognosis and short survival of HCC patients.

### Discussion

[0441] The present studies revealed that 42 miRNAs were upregulated by C/EBPα-saRNA in treated HepG2 cells, acting as tumor suppressors. On the other hand, 34 miRNAs act as oncogenes as they were downregulated by C/EBPα-saRNA in treated HepG2 cells. It was also found that 8 miRNAs were not influenced by injection of C/EBPα-saRNA. The results confirmed that multiple miRNAs are involved in HCC.

[0442] miR-134 showed positive regulation following C/EPBα-saRNA transfection. This miRNA functions as part of a tumor suppressor network where it prevents epithelial to mesenchymal transition (EMT) of cancer cells. The increased expression of miR-134 following C/EBPα-saRNA transfection suggests another important contributor to the effect of C/EPBα-saRNA where multiple genes involved in EMT transition (HGF, SMAD7, and to a lesser extent, CTNNB1) were repressed.

[0443] Expression of miR-23b also increased in the C/EPBa-saRNA transfected cells. miR-23b is normally downregulated in HCC leading to upregulation of urokinase-type plasminogen activator (uPA) and c-Met, thus increasing cell migration and proliferation. Increased levels of let7g were also seen following C/EPBa-saRNA transfection of HepG2 cells. Let7g expression is normally lost during metastatic progression of HCC.

[0444] Loss of miR-21 in C/EPBα-saRNA transfected HepG2 cells is also of note as previous reports suggest its gain of function is seen in HCC tumors and cell lines. Suppression of miR-21 is thought to enhance phosphatase and tensin homologue (PTEN) tumor suppressor activity.

[0445] A number of miRNAs, such as miR-215 or miR-193, that were found to be affected by C/EBPα-saRNA in treated cells, have not been previously reported to be involved in HCC.

[0446] The findings of the inventors disagree with the literature concerning 4 miRNAs that were found to be influenced by C/EBPα-saRNA in comparison to not treated HepG2 cells. (i.e. miR-10b, miR-125b, miR-148a and miR-191).

[0447] In conclusion, C/EBPα-saRNA clearly regulates the expression of miRNAs. The understanding provided herein regarding miRNA involvement and function in HCC as well as in other cancers supports the use of miRNAs not only as prognostic factors, but also underscores their potential role in diagnosis, staging and treatment of cancer.

TABLE 9
Summary of miRNAs that are up-regulated (Top),
unchanged (middle), and down-regulated (bottom)
in C/EBPα-saRNA treated HepG2 cells.

| | | |
|---|---|---|
| Mature miRNA | SEQ ID | Fold Regulation |

miRNA upregulated

| | | |
|---|---|---|
| hsa-let-7a-5p | 119 | 2.1059 |
| hsa-miR-133b | 120 | 1.434 |
| hsa-miR-122-5p | 121 | 1.5369 |
| hsa-miR-335-5p | 122 | 1.165 |
| hsa-miR-196a-5p | 123 | 1.434 |
| hsa-miR-142-5p | 124 | 1.434 |
| hsa-miR-96-5p | 125 | 1.0979 |
| hsa-miR-184 | 126 | 1.434 |
| hsa-miR-214-3p | 127 | 2.1278 |
| hsa-miR-15a-5p | 128 | 1.6102 |
| hsa-let-7b-5p | 129 | 1.9416 |
| hsa-miR-205-5p | 130 | 1.2197 |
| hsa-miR-181a-5p | 131 | 1.8834 |
| hsa-miR-140-5p | 132 | 1.0625 |
| hsa-miR-146b-5p | 133 | 1.2762 |
| hsa-miR-34c-5p | 134 | 1.434 |
| hsa-miR-134 | 135 | 4.3932 |
| hsa-let-7g-5p | 136 | 1.0784 |
| hsa-let-7c | 137 | 1.5508 |
| hsa-miR-218-5p | 138 | 1.434 |
| hsa-miR-206 | 139 | 1.434 |
| hsa-miR-124-3p | 140 | 3.4534 |
| hsa-miR-100-5p | 141 | 1.4176 |
| hsa-miR-10b-5p | 142 | 1.434 |
| hsa-miR-155-5p | 143 | 1.434 |
| hsa-miR-1 | 144 | 2.3958 |
| hsa-miR-150-5p | 145 | 1.3919 |
| hsa-let-7i-5p | 146 | 1.3141 |
| hsa-miR-27b-3p | 147 | 1.1952 |
| hsa-miR-127-5p | 148 | 2.2593 |
| hsa-miR-191-5p | 149 | 1.4119 |
| hsa-let-7f-5p | 150 | 1.1629 |
| hsa-miR-10a-5p | 151 | 1.434 |
| hsa-miR-15b-5p | 152 | 1.9513 |
| hsa-miR-16-5p | 153 | 2.2248 |
| hsa-miR-34a-5p | 154 | 1.0544 |
| hsa-miR-144-3p | 155 | 1.434 |
| hsa-miR-128 | 156 | 1.2021 |
| hsa-miR-215 | 157 | 1.1017 |
| hsa-miR-193a-5p | 158 | 1.1689 |
| hsa-miR-23b-3p | 159 | 1.2428 |
| hsa-miR-203a | 160 | 1.434 |

miRNA-remain unchanged

| | | |
|---|---|---|
| hsa-miR-30c-5p | 161 | 1.051869 |
| hsa-let-7c-5p | 162 | 0.058758 |
| hsa-miR-146a-5p | 163 | 0.33665 |
| hsa-let-7d-5p | 164 | 0.016391 |
| hsa-miR-9-5p | 165 | 0.000384 |
| hsa-miR-181b-5p | 166 | 0.013964 |
| hsa-miR-181c-5p | 167 | 0.028291 |

miRNA-downregulated

| | | |
|---|---|---|
| hsa-miR-20b-5p | 168 | −1.3359 |
| hsa-miR-125a-5p | 169 | −1.2372 |
| hsa-miR-148b-3p | 170 | −1.2082 |
| hsa-miR-92a-3p | 171 | −1.3741 |
| hsa-miR-378a-3p | 172 | −1.2451 |
| hsa-miR-130a-3p | 173 | −1.6427 |
| hsa-miR-20a-5p | 174 | −1.2847 |
| hsa-miR-132-3p | 175 | −1.3606 |
| hsa-miR-193b-3p | 176 | −1.3868 |
| hsa-miR-183-5p | 177 | −1.1387 |
| hsa-miR-148a-3p | 178 | −1.3625 |
| hsa-miR-138-5p | 179 | −1.7459 |
| hsa-miR-373-3p | 180 | −1.4128 |
| hsa-miR-29b-3p | 181 | −1.5059 |
| hsa-miR-135b-5p | 182 | −1.1296 |
| hsa-miR-21-5p | 183 | −1.1023 |
| hsa-miR-181d | 184 | −2.5603 |
| hsa-miR-301a-3p | 185 | −1.1637 |
| hsa-miR-200c-3p | 186 | −1.0718 |
| hsa-miR-7-5p | 187 | −1.2395 |
| hsa-miR-29a-3p | 188 | −1.2202 |
| hsa-miR-210 | 189 | −1.8605 |
| hsa-miR-17-5p | 190 | −1.1816 |
| hsa-miR-98-5p | 191 | −1.3495 |
| hsa-miR-25-3p | 192 | −1.1599 |
| hsa-miR-143-3p | 193 | −1.1295 |
| hsa-miR-19a-3p | 194 | −2.2794 |
| hsa-miR-18a-5p | 195 | −1.2477 |
| hsa-miR-125b-5p | 196 | −2.3555 |
| hsa-miR-126-3p | 197 | −2.793 |
| hsa-miR-27a-3p | 198 | −1.4998 |
| hsa-miR-372 | 199 | −1.7218 |
| hsa-miR-149-5p | 200 | −2.1206 |
| hsa-miR-32-5p | 201 | −1.5235 |

TABLE 10
11 miRNAs known to be involved in pathogenesis of liver cancer.
The top 7 are down-regulated mature miRNAs in C/EBPα-saRNA
treated cells and the bottom 4 are up-regulated miRNAs.

| | Clinical significance | | C/EPBα- | Fold |
|---|---|---|---|---|
| miRNA | in HCC | Target | saRNA | Regulation |
| hsa-miR- | No previous reports in | — | — | −1.1599 |
| 25-3p | the literature for HCC | | | |
| hsa-miR- | High expression | PI3K/Akt/ | Down | −2.3555 |
| 125b-5p | correlated to | mTOR | | |
| | longer survival | signal | | |
| | Downregulated | pathway | | |
| | in HCC | | | |
| hsa-miR- | No previous reports | — | — | −2.793 |
| 126-3p | matching our criteria in | | | |
| | the literature | | | |
| hsa-miR- | Overexpression correlates | RUNX3 | Down | −1.6427 |
| 130a-3p | to chemoresistance | Wnt | | |
| | Upregulated in HCC | signaling | | |
| hsa-miR- | Tumor aggressiveness; | — | Down | −1.1816 |
| 17-5p | poor prognosis | | | |
| | and survival | | | |
| | Upregulated in HCC | | | |
| hsa-miR- | Tumor aggressiveness | PTEN | Down | −1.1023 |
| 21-5p | and poor prognosis | RECK | | |
| | Upregulated in HCC | PDCD4 | | |
| hsa-miR- | No previous reports in | — | — | −1.3868 |
| 193b-3p | the literature for HCC | | | |
| hsa-miR- | Poor prognosis | TIMP3 | Up | 1.4119 |
| 191-5p | Upregulated in HCC | | | |
| hsa-miR- | No previous reports in | — | — | 1.1017 |
| 215 | the literature for HCC | | | |
| hsa-miR- | Tumor dissemination | UPCA | Up | 1.2428 |
| 23b-3p | Downregulated in HCC | C-MET | | |
| hsa-miR- | Cancer progression | ADAM 17 | Up | 1.5369 |
| 122-5p | Poor prognosis | | | |
| | Downregulated in HCC | | | |

### Example 8. C/EBPα-saRNA Regulates Cholesterol and LDL Levels, Insulin Resistance Genes, Treats Non-Alcoholic Fatty Liver Disease, Insulin Resistance, and Steatosis, and Regulates Metabolic Genes in BAT and WAT

[0448] C/EBPα-saRNA-dendrimers of the present invention was administered to mice in 0.1 nmol/uL standard dose, 2× doses, and 3× doses. LDL levels in blood were measured. Dose increase of C/EBPα-saRNA altered circulating levels of cholesterol (FIG. 17A) and LDL (FIG. 17B). The data show LDL circulating levels increased, indicating that LDL levels inside liver cells have decreased.

[0449] Further, studies were conducted to test C/EBPα-saRNA as a treatment for non-alcoholic fatty liver disease (NAFLD) in vivo. Rats were treated with high fat diet for 4 weeks to induce NAFLD. C/EBPα-saRNA was reconstituted with 100 ul of TEA-core PAMAM dendrimer to a concentration of 0.1 nmol/uL C/EBPα-saRNA-dendrimers. Rats with NAFLD were treated with 3× doses of C/EBPα-saRNA (R) carried by dendrimers (R+D) via tail vein injections for seven days. The rats with NAFLD in the control group were treated with PBS buffer (PBS), C/EBPα-saRNA alone (R), dendrimers alone (D), oral ezetimibe alone (E), scrambled saRNA (Sc) with dendrimer (Sc+D), or C/EBPα-saRNA with oral ezetimibe (R+E). Ezetimibe is a drug that lowers plasma cholesterol levels and is used as a positive control. The body weight and fatty liver status of the mice, including triglyceride level, cholesterol level, and liver size and appearance were recorded and analyzed. The body weight of rats treated with C/EBPα-saRNA formulated in dendrimers and C/EBPα-saRNA with oral ezetimibe was significantly smaller than the other groups. Triglyceride and cholesterol levels in the liver of rats treated with C/EBPα-saRNA formulated in dendrimers reduced respectively. Liver size of the rat treated with C/EBPα-saRNA carried by dendrimers was also reduced to the smallest compared to the control groups. Histopathologic staining of liver tissues was carried out. Liver tissues of mice treated PBS and Sc+D controls were largely red due to fatty liver in obese rats fed high fat diet. On the other hand histopathology of the liver tissues of rats in the experimental group that received saRNA-C/EBPα-dendrimers (R+D) was largely blue due to fat disappearance.

[0450] The effect of C/EBPα-saRNA on insulin resistance genes in obese rats was also studied. FAT/CD36, LPL, and LXR were chose for this study. Tissue samples from the treated rats were used to measure the expression level of the various genes. The mRNA transcript levels of FAT/CD36, LPL, and LXR genes were measured (FIG. 18B-D) in vitro by qRT-PCR mRNA expression level. Results show that the expression of FAT/CD36 was reduced, while LPL, and LXR expressions increased after treatment with C/EBPα-saRNA formulated in dendrimers. Serum cholesterol level was reduced (FIG. 19). In another study, the mRNA transcript levels of C/EBPα, SREBF-1, CD36, ACACB, APOC3, MTP, PPARγ-CoA1α, LDLR, PPARγ-CoA1β, PPARγ, ACACA, MLXIPL, PPARα, FASN, DGAT2 from obese rat liver tissues following treatment with dendrimer alone, scramble saRNA, and C/EBPα-saRNA-dendrimers were measured (FIG. 20A-O). Ezetimibe is used as positive control. The expressions of SREBP1 and CETP were reduced by C/EBPα-saRNA (data not shown).

[0451] Further, the effect of C/EBPα-saRNA on the metabolic genes in BAT and WAT cells was assessed. BAT and WAT cells were transfected with 20 nM C/EBPα-saRNA, respectfully, and mRNA levels of metabolic genes were measured as shown in FIG. 21A-21M and FIG. 22A-22M. The expressions of the metabolic genes tested were regulated compared to dendrimer control and scramble RNA control.

[0452] A repeat of fatty liver study was also conducted. After a high fat diet, obese rats have been randomly assigned to experimental and control groups. In the experimental group, transcriptional activation of C/EBPα gene was achieved using a 21 bp double-stranded RNA oligonucleotide-dendrimer (saRNA-dendrimer) complex targeted to the liver with a standard low dose and then verify with a bodyweight-adapted drug dose. The systemic and local effect of the saRNA-dendrimer complex on body weight, lipid and energy homeostasis were observed. Results were shown in Tables 11-1 to 11-12,

TABLE 11-1

| | | | | | | | mg/dL | |
|---|---|---|---|---|---|---|---|---|
| | | g/dL | U/L | U/L | mg/dL | mg/dL | Bilirubin | |
| | | Albumin | AST | ALT | BUN | Creatinine | total | HDL/LDL |
| PBS | PBS-1 | 4.9 | 86 | 63 | 14.7 | 0.6 | 0.3 | 1.01 |
| | PBS-2 | 4.5 | 120 | 83 | 14 | 0.86 | 0.3 | 0.77 |
| | PBS-3 | 4.3 | 181 | 97 | 14 | 0.67 | 0.3 | 0.54 |
| | PBS-4 | 4.9 | 96 | 79 | 16 | 0.68 | 0.3 | 0.51 |
| | PBS-5 | 4.5 | 121 | 85 | 14 | 0.86 | 0.4 | 0.72 |
| | PBS-6 | 4.6 | 181 | 100 | 15 | 0.65 | 0.3 | 0.54 |
| | PBS-7 | 4.4 | 10 | 79 | 16 | 0.69 | 0.4 | 0.45 |
| | SC + D-1 | 4.6 | 84 | 68 | 12.6 | 0.58 | 0.3 | 0.50 |
| | SC + D-2 | 4.6 | 94 | 51 | 11.8 | 0.71 | 0.5 | 0.47 |
| | SC + D-3 | 4.9 | 109 | 55 | 15.2 | 0.8 | 0.4 | 0.81 |
| | SC + D-4 | 4.6 | 86 | 68 | 12 | 0.59 | 0.3 | 0.55 |
| | SC + D-5 | 4.7 | 94 | 49 | 16 | 0.69 | 0.5 | 0.75 |
| | SC + D-6 | 4.9 | 110 | 53 | 14 | 0.7 | 0.4 | 0.37 |
| | SC + D-7 | 4.6 | 94 | 51 | 13 | 0.71 | 0.5 | 0.77 |
| | SC + D-8 | 4.2 | 105 | 55 | 15 | 0.82 | 0.4 | 0.35 |
| saRNA + | R + D-1 | 4.1 | 127 | 70 | 14.1 | 0.67 | 0.3 | 1.04 |
| dendrimer | R + D-2 | 4.4 | 117 | 80 | 9.8 | 0.62 | 0.4 | 1.09 |
| | R + D-3 | 4.8 | 129 | 105 | 16 | 0.7 | 0.5 | 1.13 |
| | R + D-4 | 4.3 | 96 | 61 | 15.5 | 0.64 | 0.3 | 1.20 |
| | R + D-5 | 4.2 | 77 | 52 | 15.8 | 0.61 | 0.4 | 0.83 |
| | R + D-6 | 4.4 | 115 | 92 | 21.5 | 0.87 | 0.6 | 1.10 |
| | R + D-7 | 4.2 | 118 | 82 | 15.4 | 0.62 | 0.4 | 2.36 |
| dendrimer | D-1 | 4.5 | 84 | 59 | 16 | 0.78 | 0.4 | 0.82 |
| | D-2 | 5 | 89 | 77 | 16.6 | 0.55 | 0.5 | 1.12 |
| | D-3 | 4.3 | 283 | 215 | 16.3 | 0.58 | 0.4 | 0.59 |
| | D-4 | 4.4 | 88 | 82 | 16.2 | 0.8 | 0.4 | 0.82 |
| | D-5 | 4.2 | 89 | 50 | 15 | 0.55 | 0.5 | 1.12 |
| | D-6 | 4.3 | 184 | 142 | 19 | 0.6 | 0.4 | 0.81 |
| | D-7 | 5 | 205 | 100 | 16.3 | 0.58 | 0.3 | 0.55 |

TABLE 11-2

| | | | K/Cumm | | | | |
|---|---|---|---|---|---|---|---|
| | | fl | Platelet | cumm | % | % | % |
| | | M.C.V | count | WBC | Neutrophils | Lymphocytes | Monocytes |
| PBS | PBS-1 | 51.2 | 1316 | 8200 | 15 | 79.4 | 3.7 |
| | PBS-2 | 51.3 | 1200 | 9300 | 25.6 | 69.5 | 3.5 |
| | PBS-3 | 49.9 | 1261 | 8390 | 24.5 | 71.1 | 4.2 |
| | PBS-4 | 50.8 | 1366 | 6100 | 25.1 | 68.2 | 4.8 |
| | PBS-5 | 51.3 | 1200 | 9300 | 25 | 69 | 3.4 |
| | PBS-6 | 49.9 | 1260 | 8390 | 23.8 | 72 | 4.2 |
| | PBS-7 | 51 | 1300 | 6200 | 24 | 67 | 4.7 |
| | SC + D-1 | 52.8 | 1303 | 9390 | 12.4 | 83.5 | 3.1 |
| | SC + D-2 | 46.3 | 1557 | 10810 | 11.2 | 84.4 | 3.5 |
| | SC + D-3 | 50.3 | 1653 | 11750 | 20.7 | 73 | 4.9 |
| | SC + D-4 | 52.8 | 1303 | 9390 | 12 | 82 | 3.3 |
| | SC + D-5 | 46 | 1550 | 11000 | 11 | 84.5 | 3.5 |
| | SC + D-6 | 52 | 1640 | 12000 | 20.7 | 73 | 5 |
| | SC + D-7 | 46 | 1400 | 9370 | 11.3 | 81 | 3.3 |
| | SC + D-8 | 51 | 1653 | 11750 | 23 | 74 | 4.9 |
| saRNA + | R + D-1 | 45.8 | 1683 | 11250 | 30.4 | 66.4 | 1.6 |
| dendrimer | R + D-2 | 48.2 | 1554 | 14190 | 24.2 | 71.5 | 3.9 |
| | R + D-3 | 45.8 | 1819 | 12150 | 17.1 | 79.8 | 2.6 |
| | R + D-4 | 50.1 | 1415 | 11850 | 19.3 | 77.5 | 2.2 |
| | R + D-5 | 47.6 | 1672 | 14630 | 13.5 | 80.4 | 5.2 |
| | R + D-6 | 50.1 | 1746 | 7470 | 26.3 | 69.7 | 2.9 |
| | R + D-7 | 46.9 | 1553 | 10390 | 28.1 | 68.7 | 1.5 |
| dendrimer | D-1 | 48.1 | 1648 | 12310 | 15.7 | 77.7 | 4.5 |
| | D-2 | 57.5 | 1542 | 8300 | 21 | 75.1 | 3.1 |
| | D-3 | 46.3 | 1193 | 14380 | 17.5 | 74.4 | 7.9 |
| | D-4 | 48 | 1650 | 12000 | 15.4 | 77 | 4.4 |
| | D-5 | 57.3 | 1450 | 8100 | 20.5 | 75.1 | 3 |
| | D-6 | 46 | 1180 | 12400 | 17 | 74.8 | 7.9 |
| | D-7 | 46.3 | 1093 | 14200 | 17.5 | 72 | 6 |

TABLE 11-3

| | | Eosinophils | Basophils | RBC | Hematocrit | M.C.H | M.C.H.C | Hemoglobin |
|---|---|---|---|---|---|---|---|---|
| PBS | PBS-1 | 1.7 | 0.2 | 9.51 | 48.7 | 17.2 | 33.7 | 16.4 |
| | PBS-2 | 1.3 | 0.1 | 8.69 | 44.6 | 17.1 | 33.4 | 14.9 |
| | PBS-3 | 0.2 | 0.5 | 8.52 | 42.5 | 17 | 34.1 | 14.5 |
| | PBS-4 | 1.6 | 0.3 | 8.15 | 41.4 | 17.2 | 33.8 | 14 |
| | PBS-5 | 1.5 | 0.2 | 8.65 | 44.2 | 17.1 | 34 | 14 |
| | PBS-6 | 0.2 | 0.5 | 8.4 | 41.4 | 17.3 | 34.1 | 15 |
| | PBS-7 | 1.6 | 0.3 | 8.15 | 39 | 17.2 | 33.5 | 14 |
| | SC + D-1 | 0.9 | 0.1 | 9.52 | 50.3 | 17.8 | 33.6 | 16.9 |
| | SC + D-2 | 0.7 | 0.2 | 10.04 | 46.5 | 16.4 | 35.5 | 16.5 |
| | SC + D-3 | 1.2 | 0.2 | 9.01 | 45.3 | 16.8 | 33.3 | 15.1 |
| | SC + D-4 | 0.9 | 0.1 | 9.5 | 50 | 17.8 | 33.8 | 16.9 |
| | SC + D-5 | 0.7 | 0.2 | 10 | 46.5 | 16 | 34 | 16 |
| | SC + D-6 | 1.1 | 0.2 | 9.01 | 44 | 15.8 | 32 | 15.1 |
| | SC + D-7 | 0.8 | 0.2 | 9.8 | 46 | 16.9 | 33 | 15.8 |
| | SC + D-8 | 1.2 | 0.2 | 9 | 41 | 16.8 | 37 | 15.7 |
| saRNA + | R + D-1 | 1.5 | 0.1 | 8.5 | 38.9 | 16.1 | 35.2 | 13.7 |
| dendrimer | R + D-2 | 0.4 | 0.1 | 10.02 | 48.3 | 16.8 | 34.8 | 16.8 |
| | R + D-3 | 0.3 | 0.2 | 10.22 | 46.8 | 16.1 | 35.3 | 16.5 |
| | R + D-4 | 0.8 | 0.2 | 8.52 | 42.7 | 17 | 34 | 14.5 |
| | R + D-5 | 0.8 | 0.1 | 8.89 | 42.3 | 16.3 | 34.3 | 14.5 |
| | R + D-6 | 0.8 | 0.3 | 9.02 | 45.2 | 17.5 | 35 | 15.8 |
| | R + D-7 | 1.6 | 0.1 | 8.62 | 40.4 | 16.1 | 34.4 | 13.9 |
| dendrimer | D-1 | 1.5 | 0.6 | 9.14 | 44 | 16.5 | 34.3 | 15.1 |
| | D-2 | 0.4 | 0.4 | 7.25 | 41.7 | 18.1 | 31.4 | 13.1 |
| | D-3 | 0.2 | 0.8 | 8.83 | 40.9 | 16 | 34.5 | 14.1 |
| | D-4 | 1.3 | 0.6 | 9 | 42 | 15 | 34 | 14.7 |
| | D-5 | 0.8 | 0.4 | 7.25 | 40 | 13 | 33 | 13.6 |
| | D-6 | 0.2 | 0.2 | 8.5 | 44 | 19 | 37.5 | 16 |
| | D-7 | 0.2 | 0.8 | 8.7 | 41 | 16 | 34.5 | 14.1 |

TABLE 11-4

| body | 7th | 8th | 9th | 10th | body weight gain |
|---|---|---|---|---|---|
| weight | week | week | week | week | (7th~10th week) |
| PBS-1 | 440 | 455 | 465 | 465 | 25 |
| PBS-2 | 505 | 515 | 525 | 530 | 25 |
| PBS-3 | 505 | 525 | 540 | 535 | 30 |
| PBS-4 | 495 | 510 | 520 | 520 | 25 |
| PBS-5 | 440 | 455 | 465 | 465 | 25 |
| PBS-6 | 504 | 516 | 527 | 542 | 38 |
| PBS-7 | 505 | 525 | 532 | 536 | 31 |
| SC + D-1 | 475 | 485 | 500 | 490 | 15 |
| SC + D-2 | 420 | 435 | 450 | 450 | 30 |
| SC + D-3 | 475 | 485 | 500 | 490 | 15 |
| SC + D-4 | 420 | 435 | 450 | 450 | 30 |
| SC + D-5 | 473 | 485 | 500 | 510 | 37 |
| SC + D-6 | 420 | 435 | 460 | 455 | 35 |
| SC + D-7 | 475 | 480 | 480 | 490 | 15 |
| SC + D-8 | 423 | 435 | 450 | 470 | 47 |
| R + D-1 | 480 | 485 | 485 | 480 | 0 |
| R + D-2 | 515 | 535 | 535 | 525 | 10 |
| R + D-3 | 435 | 440 | 445 | 435 | 0 |
| R + D-4 | 515 | 520 | 530 | 515 | 0 |
| R + D-5 | 535 | 555 | 560 | 540 | 5 |
| R + D-6 | 460 | 485 | 490 | 490 | 30 |
| R + D-7 | 465 | 470 | 480 | 475 | 10 |
| D-1 | 465 | 465 | 475 | 475 | 10 |
| D-2 | 410 | 415 | 420 | 420 | 10 |
| D-3 | 585 | 600 | 610 | 610 | 25 |
| D-4 | 462 | 465 | 475 | 480 | 18 |
| D-5 | 415 | 420 | 420 | 440 | 25 |
| D-6 | 565 | 600 | 610 | 605 | 35 |
| D-7 | 460 | 465 | 475 | 482 | 22 |

TABLE 11-5

| | liver weight | liver/body | white fat | white fat/body |
|---|---|---|---|---|
| PBS-1 | 19 | 0.041 | 19 | 0.041 |
| PBS-2 | 23 | 0.043 | 18.4 | 0.035 |
| PBS-3 | 25 | 0.047 | 22.5 | 0.042 |
| PBS-4 | 26.2 | 0.050 | 26 | 0.050 |
| PBS-5 | 19 | 0.041 | 20 | 0.043 |
| PBS-6 | 24 | 0.044 | 18.9 | 0.035 |
| PBS-7 | 25 | 0.047 | 24 | 0.045 |
| SC + D-1 | 18.6 | 0.038 | 18 | 0.037 |
| SC + D-2 | 20.6 | 0.046 | 14 | 0.031 |
| SC + D-3 | 18.6 | 0.038 | 18 | 0.037 |
| SC + D-4 | 20.6 | 0.046 | 14 | 0.031 |
| SC + D-5 | 18.5 | 0.036 | 21 | 0.041 |
| SC + D-6 | 21 | 0.046 | 19 | 0.042 |
| SC + D-7 | 18.4 | 0.038 | 21 | 0.043 |
| SC + D-8 | 20.6 | 0.044 | 18 | 0.038 |
| R + D-1 | 18.2 | 0.038 | 16 | 0.033 |
| R + D-2 | 23.4 | 0.045 | 18.2 | 0.035 |
| R + D-3 | 18 | 0.041 | 16.8 | 0.039 |
| R + D-4 | 21.4 | 0.042 | 16.5 | 0.032 |
| R + D-5 | 24.8 | 0.046 | 21 | 0.039 |
| R + D-6 | 23 | 0.047 | 17 | 0.035 |
| R + D-7 | 19.6 | 0.041 | 15 | 0.032 |
| D-1 | 23.6 | 0.050 | 16.3 | 0.034 |
| D-2 | 21.8 | 0.052 | 14 | 0.033 |
| D-3 | 33 | 0.054 | 22.3 | 0.037 |
| D-4 | 24 | 0.050 | 18 | 0.038 |
| D-5 | 20 | 0.045 | 17 | 0.039 |
| D-6 | 34 | 0.056 | 23.5 | 0.039 |
| D-7 | 25 | 0.052 | 19 | 0.039 |

TABLE 11-6

| | brown fat | brown fat/body | muscle/body | muscle from leg |
|---|---|---|---|---|
| PBS-1 | 0.36 | 0.000774 | 0.0026 | 1.2 |
| PBS-2 | 0.4 | 0.000755 | 0.0024 | 1.29 |
| PBS-3 | 0.4 | 0.000748 | 0.0026 | 1.37 |
| PBS-4 | 0.38 | 0.000731 | 0.0023 | 1.2 |
| PBS-5 | 0.35 | 0.000753 | 0.0026 | 1.2 |
| PBS-6 | 0.42 | 0.000775 | 0.0022 | 1.2 |
| PBS-7 | 0.4 | 0.000746 | 0.0026 | 1.4 |
| SC + D-1 | 0.43 | 0.000878 | 0.0024 | 1.2 |
| SC + D-2 | 0.31 | 0.000689 | 0.0022 | 1 |
| SC + D-3 | 0.42 | 0.000857 | 0.0029 | 1.4 |
| SC + D-4 | 0.33 | 0.000733 | 0.0024 | 1.1 |
| SC + D-5 | 0.31 | 0.000608 | 0.0022 | 1.1 |
| SC + D-6 | 0.43 | 0.000945 | 0.0020 | 0.9 |
| SC + D-7 | 0.5 | 0.001020 | 0.0022 | 1.1 |
| SC + D-8 | 0.2 | 0.000426 | 0.0021 | 1 |
| R + D-1 | 0.3 | 0.000625 | 0.0023 | 1.1 |
| R + D-2 | 0.48 | 0.000914 | 0.0024 | 1.26 |
| R + D-3 | 0.33 | 0.000759 | 0.0024 | 1.03 |
| R + D-4 | 0.4 | 0.000777 | 0.0026 | 1.34 |
| R + D-5 | 0.43 | 0.000796 | 0.0022 | 1.2 |
| R + D-6 | 0.4 | 0.000816 | 0.0025 | 1.23 |
| R + D-7 | 0.36 | 0.000758 | 0.0024 | 1.12 |
| D-1 | 0.25 | 0.000526 | 0.0025 | 1.2 |
| D-2 | 0.35 | 0.000833 | 0.0028 | 1.16 |
| D-3 | 0.36 | 0.000590 | 0.0023 | 1.4 |
| D-4 | 0.3 | 0.000625 | 0.0027 | 1.3 |
| D-5 | 0.32 | 0.000727 | 0.0025 | 1.1 |
| D-6 | 0.35 | 0.000579 | 0.0023 | 1.38 |
| D-7 | 0.24 | 0.000498 | 0.0024 | 1.18 |

TABLE 11-7

| | mg/dL | | | | |
|---|---|---|---|---|---|
| Before | Cholesterol | mg/dL | mg/dL | | mg/dL |
| injection | total | HDL | LDL | HDL/LDL | Triglyceride |
| PBS-1 | 91 | 12.7 | 10.2 | 1.25 | 76 |
| PBS-2 | 88 | 13 | 14.3 | 0.91 | 62 |
| PBS-3 | 75 | 8 | 12 | 0.67 | 55 |
| PBS-4 | 120 | 10.1 | 17.8 | 0.57 | 62 |
| PBS-5 | 92 | 12.5 | 10.2 | 1.23 | 72 |
| PBS-6 | 87 | 13.2 | 14 | 0.94 | 63 |
| PBS-7 | 76 | 7 | 13 | 0.54 | 55 |
| SC + D-1 | 97 | 10.5 | 14.5 | 0.72 | 48 |
| SC + D-2 | 66 | 10.9 | 11.5 | 0.95 | 42 |
| SC + D-3 | 75 | 14.8 | 9.1 | 1.63 | 72 |
| SC + D-4 | 70 | 9.3 | 12 | 0.78 | 53 |
| SC + D-5 | 78 | 11.8 | 10.5 | 1.12 | 46 |
| SC + D-6 | 68 | 7.3 | 11.7 | 0.62 | 50 |
| SC + D-7 | 78 | 11.8 | 11 | 1.07 | 46 |
| SC + D-8 | 68 | 7 | 11.2 | 0.63 | 50 |
| R + D-1 | 129 | 7.9 | 15.9 | 0.50 | 70 |
| R + D-2 | 78 | 7.4 | 13.4 | 0.55 | 77 |
| R + D-3 | 129 | 7.9 | 15.9 | 0.50 | 70 |
| R + D-4 | 78 | 7.4 | 13.4 | 0.55 | 77 |
| R + D-5 | 122 | 8.2 | 17.4 | 0.47 | 93 |
| R + D-6 | 142 | 14.9 | 19.3 | 0.77 | 95 |
| R + D-7 | 125 | 6.1 | 15 | 0.41 | 47 |
| D-1 | 93 | 10.7 | 13.5 | 0.79 | 47 |
| D-2 | 68 | 12.2 | 8.7 | 1.40 | 56 |
| D-3 | 95 | 10.3 | 12.6 | 0.82 | 58 |
| D-4 | 93 | 10.8 | 13.5 | 0.80 | 47 |
| D-5 | 68 | 12 | 8.7 | 1.38 | 55 |
| D-6 | 96 | 11 | 12 | 0.92 | 58 |
| D-7 | 93 | 10.7 | 14 | 0.76 | 50 |

TABLE 11-8

| | mg/dL | | | | |
|---|---|---|---|---|---|
| After- | Cholesterol | mg/dL | mg/dL | | mg/dL |
| before | total | HDL | LDL | HDL/LDL | Triglyceride |
| PBS-1 | 14 | 0.9 | 3.3 | −0.24 | −10 |
| PBS-2 | 28 | −0.8 | 1.6 | −0.14 | 12 |
| PBS-3 | 31 | 0.1 | 3.1 | −0.13 | −7 |
| PBS-4 | −1 | −2.2 | −2.3 | −0.06 | −4 |
| PBS-5 | 14 | 0.9 | 3.3 | −0.51 | 2 |
| PBS-6 | 29 | −0.7 | 1.5 | −0.41 | −9 |
| PBS-7 | 27 | 0.2 | 3.1 | −0.08 | 13 |
| SC + D-1 | 31 | −1.1 | 4.4 | −0.23 | 33 |
| SC + D-2 | 61 | −4.3 | 2.6 | −0.48 | 14 |
| SC + D-3 | 10 | −5.9 | 1.9 | −0.82 | −16 |
| SC + D-4 | 51 | −1.3 | 2.6 | −0.23 | 10 |
| SC + D-5 | 4 | −3.3 | 0.8 | −0.37 | 30 |
| SC + D-6 | 43 | −0.2 | 7.6 | −0.26 | 12 |
| SC + D-7 | 4 | −2 | 0.8 | −0.30 | 30 |
| SC + D-8 | 43 | −0.2 | 7.6 | −0.28 | 12 |
| R + D-1 | −33 | 3.9 | −5 | 0.54 | 27 |
| R + D-2 | 2 | 5.7 | −3 | 0.54 | −32 |
| R + D-3 | −33 | 4.4 | −5 | 0.63 | 27 |
| R + D-4 | 2 | 5.1 | −3 | 0.65 | −32 |
| R + D-5 | 3 | 6.7 | 0.5 | 0.36 | 32 |
| R + D-6 | −13 | 4.3 | −1.8 | 0.33 | −48 |
| R + D-7 | −35 | 13.7 | −6.6 | 1.95 | −3 |
| D-1 | 45 | 4 | 4.5 | 0.02 | 21 |
| D-2 | 21 | 1 | 3.1 | −0.28 | 9 |
| D-3 | 41 | 3.2 | 10.4 | −0.23 | 21 |
| D-4 | 43 | 2 | 4.5 | 0.02 | 21 |
| D-5 | 25 | 1 | 3.1 | −0.26 | 9 |
| D-6 | 41 | 1.8 | 10 | −0.11 | 11 |
| D-7 | 45 | 4 | 5 | −0.22 | 12 |

TABLE 11-9

| | | pg/mL | U/L | U/L |
|---|---|---|---|---|
| After injection | | IL-6 | IL-1b | TNF-a |
| PBS | PBS-1 | 142 | 280 | 63 |
| | PBS-2 | 133 | 250 | 83 |
| | PBS-3 | 124 | 320 | 97 |
| | PBS-4 | 133 | 185 | 79 |
| | PBS-5 | 176 | 180 | 85 |
| | PBS-6 | 104 | 201 | 100 |
| | PBS-7 | 99 | 270 | 79 |
| scramble | SC + D-1 | 112 | 270 | 68 |
| saRNA + | | | | |
| dendrimer | | | | |
| | SC + D-2 | 132 | 380 | 51 |
| | SC + D-3 | 95 | 360 | 55 |
| | SC + D-4 | 110 | 349 | 68 |
| | SC + D-5 | 142 | 210 | 49 |
| | SC + D-6 | 106 | 108 | 53 |
| | SC + D-7 | 132 | 200 | 51 |
| | SC + D-8 | 122 | 185 | 55 |
| saRNA + | R + D-1 | 62 | 56 | 70 |
| dendrimer | | | | |
| | R + D-2 | 73 | 72 | 80 |
| | R + D-3 | 64 | 80 | 105 |
| | R + D-4 | 83 | 62 | 61 |
| | R + D-5 | 42 | 60 | 52 |
| | R + D-6 | 85 | 88 | 92 |
| | R + D-7 | 75 | 84 | 82 |
| dendrimer | D-1 | 105 | 223 | 59 |
| | D-2 | 119 | 220 | 77 |
| | D-3 | 162 | 180 | 215 |
| | D-4 | 99 | 208 | 82 |
| | D-5 | 123 | 195 | 50 |
| | D-6 | 113 | 300 | 142 |
| | D-7 | 129 | 195 | 100 |

TABLE 11-10

| IL6 | | | | |
|---|---|---|---|---|
| (pg/mL) | PBS | SC + D | R + D | D |
| 1 | 142 | 112 | 62 | 105 |
| 2 | 133 | 132 | 73 | 119 |
| 3 | 124 | 95 | 64 | 162 |
| 4 | 133 | 110 | 83 | 99 |
| 5 | 176 | 142 | 42 | 123 |
| 6 | 104 | 106 | 85 | 113 |
| 7 | 99 | 132 | 75 | 129 |
| 8 | | 122 | | |
| AVERAGE | 130.14 | 118.88 | 69.14 | 121.43 |
| sd | 23.76 | 14.79 | 13.66 | 19.11 |
| T TEST | | 0.32 | 0.00 | 0.50 |

TABLE 11-11

| IL-1b | | | | |
|---|---|---|---|---|
| (pg/mL) | PBS | SC + D | R + D | D |
| 1 | 280 | 270 | 56 | 223 |
| 2 | 250 | 380 | 72 | 220 |
| 3 | 320 | 360 | 80 | 180 |
| 4 | 185 | 349 | 62 | 208 |
| 5 | 180 | 210 | 60 | 195 |
| 6 | 201 | 108 | 88 | 300 |
| 7 | 270 | 200 | 84 | 195 |
| 8 | | 185 | | |
| AVERAGE | 240.86 | 257.75 | 71.71 | 217.29 |
| sd | 49.48 | 91.66 | 11.73 | 36.55 |
| T TEST | | 0.69 | 0.00 | 0.37 |

TABLE 11-12

| TNF-α | | | | |
|---|---|---|---|---|
| (pg/mL) | PBS | SC + D | R + D | D |
| 1 | 1200 | 1210 | 320 | 1050 |
| 2 | 1107 | 990 | 600 | 970 |
| 3 | 980 | 870 | 640 | 1300 |
| 4 | 1204 | 1005 | 580 | 1005 |
| 5 | 1008 | 890 | 640 | 890 |
| 6 | 990 | 889 | 700 | 1020 |
| 7 | 840 | 780 | 820 | 1140 |
| 8 | | 105 | | |
| AVERAGE | 1047.00 | 842.38 | 614.29 | 1053.57 |
| sd | 121.75 | 303.36 | 140.90 | 122.73 |
| T TEST | | 0.14 | 0.00 | 0.93 |

[0453] In the experimental group, serum cholesterol and body weight were significantly reduced. High-dose of C/EBPα saRNA notably lowered serum triglyceride, improved serum lipoprotein profile and decreased white adipose tissue content. Gene expression analysis showed a significant change in gene transcription activation in the experimental group in comparison with control groups. In the liver, C/EBPα significantly decreased the expression of genes involved in fatty acid uptake (CD36) and hepatic de novo lipogenesis (SREBP-1, ChREBP), whilst beta-oxidation (PPARα, PPARγ-CoA1α, PPARγ-CoA1β) and insulin sensitivity genes (PPARγ) were upregulated. In white adipose tissue, decreased expression of CD36 and ACACB genes was found, suggesting a reduction in inflammation and an increase in beta-oxidation, respectively. Downregulation of genes involved in white adipose tissue lipogenesis was noted (SREBP-1, ACACA, mTOR). Finally, enhanced expression of PPARγ-CoA1α in white adipose tissue was also observed. C/EBPα improved liver steatosis and hepatic energy metabolism with positive systemic effects on insulin resistance, metabolic abnormality and body fat in a NAFLD model. Low-dose of C/EBPα saRNA had a positive effect on body weight that could be mediated by improvement in hepatic lipid and glucose metabolism and by secondary positive effect on white adipose tissue. High-dose of C/EBPα saRNA had a stronger antidyslipidemic action probably due to a broader systemic effect.

[0454] Therefore, C/EBPα-saRNA may be used as a therapeutic agent to treat NAFLD and to reduce triglyceride and LDL cholesterol levels in liver cells. It may also be used to reduce insulin resistance, systemic lipidaemia, hyperinsulinaemia and steatosis in patients in need thereof.

| Gene | SEQ ID | Ref SEQ ID |
|---|---|---|
| FAT/CD36 | 207 | NM_000072.3 |
| FAT/CD36 (mouse) | 221 | NM_001159555 |
| LPL | 208 | NM_000237.2 |
| LPL (mouse) | 222 | NM_008509.2 |
| LXR | 209 | NM_005693.3 |
| LXR (mouse) | 223 | NM_013839.4 |
| SREBP1 | 210 | NM_004176 |
| SREBP1 (mouse) | 224 | NM_011480 |
| DGAT2 | 211 | NM_032564 |
| DGAT2 (mouse) | 225 | NM_026384.3 |
| CETP | 212 | NM_000078 |
| FASN | 213 | NM_004104.4 |
| FASN (mouse) | 226 | NM_007988.3 |
| Albumin | 219 | NM_000477.5 |
| Albumin (mouse) | 227 | NM_009654.3 |
| ACACA | 228 | NM_198834.1 |
| ACACA (mouse) | 229 | NM_133360 |
| ACACB | 230 | NM_001093.3 |
| ACACB (mouse) | 231 | NM_133904 |
| APOC3 | 232 | NM_000040.1 |
| APOC3 (mouse) | 233 | NM_023114 |
| MTP | 234 | NM_000253.2 |
| MTP (mouse) | 235 | NM_001163457 |
| PPARγ-CoA1α | 236 | NM_013261.3 |
| PPARγ-CoA1α (mouse) | 237 | NM_008904.2 |
| PPARγ-CoA1β | 238 | NM_133263.3 |
| PPARγ-CoA1β (mouse) | 239 | NM_133249.2 |
| PPARγ | 240 | NM_138712.3 |
| PPARγ (mouse) | 241 | NM_001127330 |
| PPARα | 242 | M_001001928.2 |
| PPARα (mouse) | 243 | NM_011144.6 |
| LDLR | 244 | NM_000527.4 |
| LDLR (mouse) | 245 | NM_010700.3 |
| MLXIPL | 246 | NM_032951.2 |
| MLXIPL (mouse) | 247 | NM_021455 |

### Example 9. C/EBPα-saRNA Regulates Pluripotency

[0455] C/EBPα-saRNA of the present invention was administered to CD34+ stem cells and the relative expressions of C/EBPα, C/EBPβ3, pluripotency factors SOX2, OCT4, cKit, KLF4, and NANOG were measured after transfection of C/EBPα-saRNA of different concentrations (25 nM, 50 nM, 100 nM or 150 nM) (FIG. 23 and FIG. 24). The relative expressions of C/EBPβ, SOX2, OCT4, cKit, KLF4 were reduced, while C/EBPα and NANOG expression increased. Therefore, C/EBPα-saRNA is able to regulate the core regulatory circuitry of stem cells that controls the self-renewal and pluripotency properties of stem cells.

| Gene | SEQ ID | Ref SEQ ID |
|---|---|---|
| SOX2 | 214 | NM_003106 |
| OCT4 | 215 | NM_001173531 |
| cKit | 216 | NM_000222 |
| KLF4 | 217 | NM_004235 |
| NANOG | 218 | NM_024865 |

### Example 10. C/EBPα-saRNA Regulates C/EBPα Protein Isoforms

[0456] The C/EBPα mRNA generates two different translational isoforms by using different start codons within the same open reading frame: the full length 42 kDa protein and a 30 kDa truncated form. The 30 kDa isoform lacks an N-terminal transactivating domain (TAD1), but still retains its central transactivating domain (TAD2). These isoforms have different functions in gene activation and cell proliferation. Both isoforms can be detected within the cell and it is likely that the ratio of isoforms is important in mediating proliferation and differentiation control. [Calkhoven et al., Genes and Development, vol. 14, 1920-1932 (2000); Ramji et al., Biochem J., vol. 365(Pt 3), 561-575 (2002), the contents of which are incorporated herein by reference in their entirety].

[0457] To study the effect of C/EBPα-saRNA on the isoform ratio, HepG2 cells were transfected with 50 nM of C/EBPα-saRNA (AW1) or 20 nM of C/EBPα-siRNA with scramble oligonucleotides (siRNA and saRNA) as negative controls. Cells were transfected three times at 0 hrs, 24 hrs and 48 hrs. Cells were harvested at 72 hrs for total protein extraction. A Bradford assay was performed to normalize total protein loaded onto a sodium-dodecyl-sulphate polyacrylamide gel for separation by electrophoresis. The separated proteins were then immobilized onto nitrocellulose for a Western blot to detect protein expression of C/EBPα and C/EBPβ. A stand antibody that recognizes the N-terminal domain of proteins (Antibody clone EP708Y, Millipore®) was used to detect any of the isoforms. Results show that endogenous levels of C/EBPα appear to be expressed predominantly as the 30 kDa variant in untransfected and scramble transfected cells. C/EBPα-saRNA transfection caused expression of a 42 kDa isoform of C/EBPα. This was then repressed in cells transfected with C/EBPα-siRNA. Endogenous C/EBPβ levels of the 34 kDa variant (defined as LAP, Liver Activated Protein) appear to be the predominantly expressed form in untransfected or scramble transfected cells. Transfection of C/EBPα-saRNA causes predominant expression of the 30 kDa variant (defined as LIP, Liver Inhibitory Protein). Expression of LIP was repressed in C/EBPα-siRNA transfected cells.

[0458] In another study, HepG2 cells were transfected with 50 nM of C/EBPα-saRNA (AW1 and AW2) or 20 nM of C/EBPα-siRNA with scramble oligonucleotides (siRNA and saRNA) as negative controls. An antibody that only recognizes the 42 KDa C/EBPα isoform (Cell Signaling Antibody #2843, Cell Signaling Technology®) was used instead of the standard antibody used in the study above. Western Blot results confirmed the 42 KDa C/EBPα isoform is upregulated by activating the C/EBPα gene. AW1 and AW2 both increased the 42 KDa C/EBPα isoform expression, indicating that the upregulation of the 42 KDa C/EBPα isoform might be gene specific and not sequence specific.

[0459] In another study, MCF7 cells are transfected with 50 nM C/EBPα-saRNA and 20 nM C/EBPα-siRNA with scramble oligonucleotides (siRNA and saRNA) as negative controls. Western blot is carried out to study the expressions of C/EBPα and C/EBPβ isoforms.

[0460] The studies above show that C/EBPα-saRNA modulates various C/EBPα and C/EBPβ isoforms. Not willing to be bound to any theory, the increase of the 42 kDa C/EBPα isoform might contribute to the novel anti-proliferation and other therapeutic effects of C/EBPα-saRNA.

| Protein | SEQ ID | Ref SEQ ID |
|---|---|---|
| C/EBPα 42 kDa | 251 | NP_004355.2 |
| C/EBPα 30 kDa | 252 | NP_001272758.1 |

### Example 11. C/EBPα-saRNA and Other C/EBP Family Members

[0461] HepG2 cells were seeded in normal RPMI/FBS/PSG media and transfected 2× doses with C/EBPα-saRNA with nanofectamine. Cells were harvested at 48 hours post C/EBPα-saRNA transfection and were analyzed for mRNA levels of C/EBPα, C/EBPβ, C/EBPγ, C/EBPδ and C/EBPζ. Concentrations of C/EBPα-saRNA employed were 50 nM, 100 nM, 200 nM and 250 nM. Cells transfected with scramble-saRNA were used as a control. Results show that the relative expression of all C/EBP family members increases after C/EBPα-saRNA and that the changes are dose dependent.

[0462] Furthermore, HepG2 cells were transfected 2× doses with siRNA inhibiting C/EBPα gene expression (C/EBPα-siRNA) with nanofectamine. With the knock-down of C/EBPα gene, the relative expression of other members of the C/EBP family was also inhibited. Concentration of C/EBPα-siRNA was 20 nM. Scramble siRNA was acquired from Invitrogen.

[0463] This study suggests that C/EBPα regulates the expression levels of the other members of the C/EBP family.

| Gene | SEQ ID | Ref SEQ ID |
|---|---|---|
| C/EBPα | 202 | NM_004364.3 |
| C/EBPα (mouse) | 220 | NM_007678.3 |
| C/EBPβ | 203 | NM_005194.3 |
| C/EBPγ | 204 | NM_005195.3 |
| C/EBPδ | 205 | NM_001252296.1 |
| C/EBPζ | 206 | NM_005760.2 |

### Example 12. C/EBPα-saRNA in U87 Glioblastoma Cells

[0464] C/EBPα-saRNA was cloned into clinical retroviral replicating vector (RRV) in a miRNA configuration. The experiment investigated if the vector-miRNA configuration would work in combination with cytosine deaminase gene therapy in U87 glioblastoma cells. The retrovirus was expressing a double stranded sequence of C/EBPα-saRNA in a miRNA design, referred to as C/EBPα-miRNA, wherein the saRNA hairpin sequence was cloned into a miR-30 backbone flanking sequence. C/EBPα-miRNA might further comprise restriction enzyme recognition sequences. Non-limiting examples of restriction enzyme include NotI with a recognition sequence of GCGGCCGC and AscI with a recognition sequence of GGCGCGCC. One non-limiting example of C/EBPα-miRNA sequence is shown below and FIG. 26, wherein the microRNA is miR-30, C/EBPα-saRNA guide strand is AW1 antisense (SEQ ID No. 2) and passenger strand is AW1 sense (SEQ ID No. 1). C/EBPα-miRNA may be attached to a transgene so it can be co-expressed from an RNA pol II promoter. In this study, the C/EBPα-miRNA was attached to a green fluorescent protein gene (GFP). The GFP-C/EBPα-miRNA is expressed as a single transcript and the C/EBPα-miRNA is processed by Drosha and Dicer like an endogenous miR-30.

| | |
|---|---|
| C/EBPα-miRNA | UUGUUUGAAUGAGGCUUCAGUACUUUACAGAAUCG |
| sequence | UUGCCUGCACAUCUUGGAAACACUUGCUGGGAUUA |
| | CUUCUUCAGGUUAACCCAACAGAAGGCUCGAGAAG |
| | GUAUAUUGCUGUUGACAGUGAGCGCGGCGGUCAUU |
| | GUCACUGGUCAUAGUGAAGCCACAGAUGUAUGACC |
| | AGUGACAAUGACCGCCUUGCCUACUGCCUCGGAAU |
| | UCAAGGGGCUACUUUAGGAGCAAUUAUCUUGUUUA |
| | CUAAAACUGAAUACCUUGCUAUCUCUUUGAUACAU |
| | U (SEQ ID No. 248) |

[0465] In the results shown in FIG. 25, U87 cells were transfected with C/EBPα-saRNA (CAW1) or transduced with RRV-C/EBPα-miRNA (miCAW1) and C/EBPα mRNA transcript levels were measured by qPCR. Scrambled siRNA (con) and retrovirus vector delivering a small inhibitory hairpin against firefly Luciferase (mifLuc) were used as negative controls. On day 4, C/EBPα gene expression was up-regulated 1.5 fold with C/EBPα-saRNA transfection and 2 fold with the C/EBPα-miRNA vector transduction. Significant cell death was seen in C/EBPα-saRNA but not C/EBPα-miRNA. C/EBPα-miRNA may need more time to process.

[0466] Therefore, C/EBPα-saRNA may be cloned into a RRV in a miRNA configuration while still retaining its function to up-regulate C/EBPα gene expression in U87 cells.

### Example 13. C/EBPα-saRNA in Human Studies

[0467] C/EBPα-saRNA-dendrimers were tested in clinical studies. Both strands of C/EBPα-saRNA have 2′-OMe-U modifications (mU) at 3′-terminus. Sequence and physical properties are shown below. Generation 4 (G4) diaminobutane (DAB)-core-PAMAM dendrimers (NanoSynthons LLC, Michigan) were used to form complexes with C/EBPα-saRNA. The ratio of C/EBPα-sRNA to DAB-core-PAMAM was 1:3 in weight. This C/EBPα-saRNA-dendrimer complex (MTL-501) was synthesized at the Synthetic and Biopolymer Chemistry Core, City of Hope Beckman Research Institute, Duarte CA. This C/EBPα-saRNA-dendrimer complex is a lyophilized powder containing only the active ingredient is supplied as 50 mg per vial.

| CEBPA AW-1 Sense: | |
|---|---|
| (SEQ ID No. 249) | |
| 5′-rCrGrG rUrCrA rUrUrG rUrCrA rCrUrG rGrUrC rArUmU-3′ | |
| CEBPA AW-1 Anti-sense: | |
| (SEQ ID No. 250) | |
| 5′-rUrGrA rCrCrA rGrUrG rArCrA rArUrG rArCrC rGrUmU-3′ | |
| Molecular Weight of CEBPA AW-1 Sense: 6641.0 g/mole | |
| MOLECULAR WEIGHT: | 6641.0 g/mole |
| EXTINCTION COEFFICIENT: | 201800 L/(mole•cm) |
| nmole/OD₂₆₀: | 4.96 |
| ug/OD₂₆₀: | 32.91 |
| Molecular Weight of CEBPA AW-1 Anti: 6710.1 g/mole | |
| WEIGHT: | 6710.1 g/mole |
| EXTINCTION COEFFICIENT: | 209600 L/(mole•cm) |
| nmole/OD₂₆₀: | 4.77 |
| ug/OD₂₆₀: | 32.01 |

[0468] The effect of C/EBPα-saRNA-dendrimer treatment was tested on cirrhotic patients. Cirrhotic patients have a depressed serum albumin level lower than the normal ranger of 35-40 g/l. This hypoalbuminemia is caused by decreased synthesis by hepatocytes and water and sodium retention that dilutes the content of albumin in the extracellular space. The administration of albumin protein to cirrhotic patients is widely used to improve liver and renal function and to decrease circulatory dysfunction [Lee, Korean Journal of Internal Medicine, vol. 27(1), 13-19 (2012); Bernardi et al., Critical Care, vol. 16, 211-217 (2012)]. In this study, three doses of C/EBPα-saRNA-dendrimer MTL-501 were given to cirrhotic patients in day 1, day 3, and day 5 at about 0.5 mg/kg. Serum albumin levels were measured until day 38 as shown in FIG. 27. A significant increase in serum albumin level was observed around day 15, when the serum albumin level increased to normal range. The serum albumin level maintained at normal range until day 34.

[0469] In another study, C/EBPα-saRNA-dendrimer was used to increase white blood cell count in cirrhotic patients. Three doses of C/EBPα-saRNA-dendrimer MTL-501 were given to cirrhotic patients in day 1, day 3, and day 5 at about 0.5 mg/kg. A single dose given to Patient 1 contained 10 mg C/EBPα-saRNA and 30 mg dendrimer. A single dose given to Patient 3 contained 20 mg C/EBPα-saRNA and 60 mg dendrimer. For both patients, an increase in white blood count was observed after first dose at day 2 and a bigger increase was observed at day 9 after 3 doses of C/EBPα-saRNA-dendrimer MTL-501 treatment.

[0470] The human study results suggest that C/EBPα-saRNA-dendrimer may be used as a therapeutic agent to treat patients with liver diseases and to increase white blood cell counts in patients in need thereof.

### Example 14. Strand Selection/Identification and Cleavage Studies

[0471] Inverted abasic modifications at 5′ terminus have been shown to prevent loading into the guide position in Ago2 complex. Antisense strand (AS) and sense strand (SS) of C/EBPA-saRNA were blocked with an inverted abasic modification at 5′ end (b) and C/EBPA mRNA expression was measured and the impact of blocking AS and/or SS strands on C/EBPA mRNA expression was determined. All saRNA were synthesized and annealed in water. RP-HPLC has 90% purity. Sequences of the oligonucleotide samples were shown in the following table.

TABLE 12
Sequences of oligonucleotides used in the studies

| Oligo ID | Sequence (SS on top) | SEQ ID No. | Notes |
|---|---|---|---|
| NC-500000 | 5′-ACUACUGAGUGACAGUAGAUU-3' | 33 | Non-specific ′scramble′ (negative |
| | 3′-UUUGAUGACUCACUGUCAUCU-5' | 255 | control) |
| CEBPA- | 5′-CGGUCAUUGUCACUGGUCAUU-3' | 256 | ′AW1′ (positive control) |
| AW01-5000 [symbol] | 3′-UUGCCAGUAACAGUGACCAGU-5' | 257 | |
| CEBPA- | 5′-bCGGUCAUUGUCACUGGUCAUU-3' | 258 | Inverted abasic modification on SS |
| AW01-5000 [symbol] | 3′-UUGCCAGUAACAGUGACCAGU-5' | 257 | only |
| CEBPA- | 5′-CGGUCAUUGUCACUGGUCAUU-3' | 256 | Inverted abasic modification on AS |
| AW01-5000 [symbol] | 3 -UUGCCAGUAACAGUGACCAGUb-5' | 259 | only |
| CEBPA- | 5′-bCGGUCAUUGUCACUGGUCAUU-3' | 258 | Inverted abasic modification on both |
| AW01-5000 [symbol] | 3′-UUGCCAGUAACAGUGACCAGUb-5' | 259 | SS and AS (negative control) |
| CEBPA- | 5′-CGGUCAUUCAGACUGGUCAUU-3' | 260 | Mutated central three base pairs |
| AW01-5005 [symbol] | 3′-UUGCCAGUAAGUCUGACCAGU-5' | 261 | |

[symbol]

indicates data missing or illegible when filed

[0472] DU145 cells were reverse transfected with 50 nM oligonucleotide samples at seeding, forward transfected 24 hours later, and harvested at 72 hours. C/EBPA, ALB, and p21 mRNA expression levels were measured as shown in FIG. 28A-28C. The same study was carried out with 10 nM oligonucleotide samples and results were shown in FIG. 28D-28F. AW01-500012 acted similar to AW01-500000, showing blocking the SS does not affect upregulation. AW01-500013 and AW01-500014 acted similar to NC-500000, showing that blocking AS mutes upregulation. C/EBPA-saRNA acts through AS strand.

[0473] RNAi involves cleavage of target mRNAs. A non-cleaving sequence, mutations of central 3 base pairs, was tested (CEBPA-AW01-500500) to determine whether CEBPA-saRNA cleaves the target EST (AW665812). Mutation of the central 3 base pairs creates a non-cleavable saRNA, regardless of which strand serves as the guide. CEBPA-AW01-500500 is able to up-regulate CEBPA gene compared with negative control NC-500000, suggesting that cleaving of a transcript is not required for CEBPA upregulation, although the up-regulation is less than positive control AW01-500000.

### Example 15. C/EBPα-saRNA Upregulates ecCEBPA RNA and EST

[0474] Extra coding CEBPA (ecCEBPA), a functional ncRNA transcribed from the CEBPA locus, regulates CEBPA methylation by interacting with DNA methyltransferase (DNMT1) thus preventing CEBPA gene methylation. It has been found that ecCEBPA knockdown led to a decrease of CEBPA mRNA expression and to a significant increase in DNA methylation (Ruscio et al., Nature, vol. 503:371-376 (2013) and US 20140171492 to Di Ruscio et al., the contents of each of which are incorporated herein by reference in their entirety). DU145 cells were transfected with oligonucleotides in Table 12 (above). The levels of ecCEBPA and CEBPA mRNA were measured and shown in FIG. 29A-29B (using 50 nM CEBPA-saRNA) and 29C-29D (using 10 nM CEBPA-saRNA). All the CEBPA-saRNAs upregulated both CEBPA mRNA and ecCEBPA except negative control (NC-500000). At 10 nM, the double-abasic modified oligo (AW01-500014) showed less activation of ecCEBPA.

[0475] Furthermore, the levels of EST of CEBPA mRNA, AW665812, in DU145 cells were measured. DU145 cells were reverse transfected with 50 nM oligonucleotide in Table 12 (above) at seeding, forward transfected 24 hours later, and harvested at 72 hours. Results in FIG. 29E were from 2 repeats. Results in FIG. 29E showed that CEBPA-saRNAs upregulated EST instead of cleaving it.

### Example 16. C/EBPα-saRNA Transfection Methods with a Reverse Transfection and a Forward Transfection

### A). HepG2 Cells

### Materials

[0476] Materials used in the studies included media: RPMI (Sigma, R8758/500ML) 1× Pen strep (Sigma P4333/100ML) 10% FBS (Life 10082147); 24/well plates (Sigma Z707791/126EA); Lipofectamine 2000 (Life 11668027); TransIT/X2 (Mirus M6003); RNAiMAX (Life 13778030); Optimem 500 mL (Life 11058021); RNeasy Plus Mini Kit (Qiagen 74134); QuantiTect Rev. Transcription Kit (50, Qiagen 205311); Qiashredder 79654; MicroAmp® Optical Adhesive Film (Applied Biosystems, 4360954); MicroAmp® Fast Optical 384/Well Reaction Plate with Barcode, 0.1 mL (Applied Biosystems, 4346906); TaqMan® Fast Advanced Master Mix (1×5 mL, Life Tech 4444556); MicroAmp® Optical Adhesive Film (Life Tech 4360954); MicroAmp® Fast Optical 96/Well Reaction Plate with Barcode (Life Tech 4346906); 5 ml Serological PS Pipette (Sterile, Ind. Wrapped, 200/cs, USA Sci P/2837/5); 10 ml Serological PS Pipette (Sterile, Ind. Wrapped, 200/cs, USA Sci P/2837/10); 25 ml Serological PS Pipette (Sterile, Ind. Wrapped, 200/cs, USA Sci P/2837/25); 1000 ul tips (USA Sci 1111/2721); 200 ul tips (USA Sci 1111-0700); and 20 ul TipOne natural tip (USA Sci 1120-1810). Taqman® assays used in the experiment were CEBPA FAM/TAMRA Probe (Applied Biosystems, Hs00269972_s1) and GusB Endogenous Control VIC/TAMRA Probe (Applied Biosystems, Hs99999908_m1) AW1.

saRNA/siRNA Used in the Experiment

[0477] Oligonucleotides used in the experiment included AW1 (CEBPA/AW01/500000), AW1/MM (CEBPA/AW01/500100), AW1/2OMe1 (CEBPA/AW01/500001), AW1/2OMe2 (CEBPA/AW01/500011), Scrambled 2OMe1 (NC/510003), and SMARTpool ON/TARGETplus CEBPA siRNA.

saRNA Handling

[0478] Oligonucleotides were rehydrated to 1 mM in 10 mM Tris/HCl, 20 mM NaCl2, 1 mM EDTA. This was accomplished by first adding the appropriate volume of 5× Annealing Buffer (50 mM Tris/Hcl; 100 mM NaCl2; 5 mM EDTA) followed by addition of RNase/free water. The mixture was vortexed gently to complete rehydration. Equivalent volumes of AS and SS strands were mixed together by gentle vortexing. Tube with combined strands was placed in a beaker of milliQ/water at 95° C. (no boiling was allowed). The beaker was covered and water was allowed to cool to room temperature slowly. Aliquot annealed saRNA was stored at/20° C. Subsequent dilutions was performed using RNAse/free H2O.

### HepG2 Maintenance

[0479] HepG2 cells were regularly passaged in RPMI supplemented with 10% Fetal Bovine Serum to maintain log phase growth. Cultures were discontinued when passage number exceeded 10.

### Nucleic Acid/Lipofectamine Complex Formation

[0480] All reagents were brought to room temperature before proceeding. 1.5 ul Lipofectamine 2000 was added to 50 ul Optimem per transfection. saRNA was added to 50 ul Optimem for a final concentration of 50 nM. Diluted Lipofectamine and saRNAs were mixed gently and incubated for 5 minutes at room temperature.

### Preparing HepG2 Cells for Transfection

[0481] Cells were detached with Trypsin/EDTA, triturated in an equal volume of growth medium and cell number was determined. Cells were centrifuged at 1000×g for 5 minutes and the cell pellet was resuspended in growth media so that 400 ul of growth media gave a 40% confluency in a well of 24 well plate. Nucleic acid/Lipofectamine complexation was gently added to cells and plated in a 24 well plate format. Final volume of cells, media and transfection complex was 500 ul. 24 hours later, cells should be around the 40%-45% confluency. Cells were retransfected 24 hours later, following same procedure for nucleic acid/Lipofectamine complexation but the complex was added to attached cells freshly fed with 400 ul growth media. Cells were fed 24 hours later with fresh growth media. RNA extraction was performed 24 hours after media change. All transfections were performed in triplicate. In summary, a reverse transfection was followed with a forward transfection.

Purification of Total RNA using RNeasy

[0482] Growth medium and lyse cells were aspirated in 350 ul RLT Buffer, pipetted several times and transferred to QIAshredder tube. They were then transferred through RNeasy spin column and wash steps were preformed per manufacturers protocol. Equal volume of 70% Ethanol was added to lysate and mixed thoroughly. Lysate/ethanol mixture was applied to a Filter Cartridge in a Collection Tube and spinned at 15,000×g for 30 seconds. Flow/through was discarded. 700 ul Wash Solution #1 was applied to Filter Cartridge and spinned at 15,000×g for 30 seconds. 500 ul Wash Solution #2/3 was added to Filter Cartridge and spinned at 15,000×g for 30 seconds. A second wash was repeated using Wash Solution #2/3. Flow/through was discarded and recentrifuged at 15,000×g for 30 seconds to remove residual traces of wash solution. Filter cartridge was placed into a fresh Collection Tube. 40 ul of Pipet Elution Solution was applied to center of filter. Cap of tube was closed. Eluate was recovered by centrifugation at 15,000×g for 30 seconds at room temperature.

### RNA Quantification

[0483] RNA concentration was measured using a NanoDrop spectrophotometer.

Preparation of cDNA Archive

[0484] Equivalent amounts of RNA (between 500 ng to 2 μg) were used as input for each RT reaction. Amounts were determined after RNA extraction and quantification. All reactions were set up on ice to minimize the risk of RNA degradation. 1). RT Primer Mix and 5× Quantiscript RT Buffer were premixed in a 1:4 ratio if RT Primer Mix was used routinely for reverse transcription. 2). Any precipitates in gDNA Wipeout Buffer was dissolved by vortexing. 3). Template RNA was thawed on ice. gDNA Wipeout Buffer, Quantiscript Reverse Transcriptase, Quantiscript RT Buffer, RT Primer Mix, and RNase/free water were thawed at room temperature (15-25° C.). 4). The genomic DNA elimination reaction was prepared on ice according to Table 13. 5). The components were mixed and then stored on ice.

TABLE 13
Genomic DNA elimination reaction components

| | | Final |
|---|---|---|
| Component | Volume/reaction | concentration |
| gDNA Wipeout Buffer, 7× | 2 ul | 1× |
| Template RNA | Variable (up to 1 ug*) | |
| RNase-free water | Variable | |
| Total volume | 14 ul | — |

[0485] 6). The mixture was incubated at 42° C. and then placed immediately on ice. 7). The reverse-transcription master mix was prepared on ice according to Table 14.

TABLE 14
Reverse-transcription reaction components

| | | Final |
|---|---|---|
| Component | Volume/reaction | concentration |
| Reverse-transcription master mix | | |
| Quantiscript Reverse Transcriptase* | 1 ul | |
| Quantiscript RT Buffer, 5×†‡ | 4 ul | 1× |
| RT Primer Mix | 1 ul | |
| Template RNA | | |
| Entire genomic DNA elimination | 14 ul (added | |
| reaction (s [symbol] 3).) | at step 5).) | |
| Total volume | 20 ul | — |

*Also contains RNase inhibitor.
†Include Mg2+ and dNTPs.
‡For convenience, PT Primer Mix and 5 × Quantiscript RT Buffer may be premixed in a 1:4 ratio if RT Primer Mix is used routinely for reverse transcription. This premix is stable when stored at −20° C. 5 ul of the premix is used per 20 ul reaction. [symbol]
indicates data missing or illegible when filed

[0486] 8). Template RNA from step 3 (14 μl) was added to each tube containing reverse/transcription master mix. 9). The components were mixed and then stored on ice. 10). The mixture was incubated for 15 min at 42° C. 11). The mixture was incubated for 3 min at 95° C. to inactivate Quantiscript Reverse Transcriptase. 12). An aliquot of each finished reverse/transcription reaction was added to real/time PCR mix. 13). Reverse/transcription reactions were stored on ice and proceeded directly with real/time PCR, or for long/term storage, stored at −20° C.

### Gene Expression Analysis

[0487] Quantitative PCR evaluation was used to measure relative gene expression by Taqman FAST qPCR on QuantStudio 7 Flex Real/Time PCR System. The volume of components needed to prepare the qPCR reaction plate was calculated using Table 14 below. Note: Additional reactions may be considered in the calculations to provide excess volume for the loss that occurs during reagent transfers.

[0488] Using a multichannel pipette, 6 uL of the reaction master mix was added to each well of a MicroAmp® Fast Optical 384/Well Reaction Plate. Using a multichannel pipette, 4 uL of cDNA from the cDNA archive reaction plates was added. The plate was sealed using MicroAmp Optical adhesive film. The plate was placed on ice until the thermal cycler is ready to load. All qPCR reactions were run in triplicate.

### B). DU145 Cells

### DU145 Culture Conditions:

[0489] Du145 cells grow more robustly when compared to HepG2. They are less susceptible to stress from trypsinisation or over-confluency. Routine media: RPM1649 (Sigma, R8758-500ML) supplemented with Pen/Strep/Glut (Sigma G1146) and 10% FBS (Life 10082147).

### DU145 Seeding Density for Transfection:

[0490] Since DU145 cells have faster doubling rates than HepG2 cells, initial seeding density for transfection will be lower. For 24 well format: DU145=0.8×10⁵ cells/well; for 6 well format: DU145=200×10⁵ cells/well.

### Transfection

[0491] Transfection of DU145 cells followed the same procedure as HepG2 cells: On the day of seeding into either 24 or 6 well format, the cells were subjected to a ‘reverse transfection’ step where lipofectamine 2000 based saRNA complexation in OptiMEM media was added to the cells before they adhered as a monolayer. After 24 hours, the media was replenished and thereafter a forward transfection step was performed. This was incubated for a further 24 hours prior to harvesting of cells for downstream application.

saRNA Handling:

[0492] Oligonucleotides were rehydrated to 1 mM in 10 mM Tris-HCl, 20 mM NaCl2, 1 mM EDTA. This was accomplished by first adding the appropriate volume of 5× Annealing Buffer (50 mM Tris-Hcl; 100 mM NaCl2; 5 mM EDTA) followed by addition of RNase-free water. Vortex was performed gently to complete rehydration. Equivalent volumes of AS and SS strands were mixed together by gentle vortexing. Tube with combined strands was placed in a beaker of milliQ-water at 95° C. (do not allow to boil). The beaker was covered and water was allowed to cool to room temperature slowly. Aliquot annealed saRNA was stored at −20° C. Subsequent dilutions was performed using RNAse-free H2O.

### Nucleic Acid/Lipofectamine Complex Formation

[0493] All reagents were brought to room temperature before proceeding. 1.5 ul/3 ul (for 24 well/6 well plate) Lipofectamine 2000 was added to 50 ul/125 ul Optimem per transfection (for 24 well/6 well plate). saRNA was added to 50 ul/125 Optimem (for 24 well/6 well plate) for a final concentration of 50 nM. Diluted Lipofectamine and saRNAs were combined, mixed gently, and incubated for 15 minutes at room temperature.

### Transfecting DU145 Cells

[0494] Cells were detached with Trypsin-EDTA, and excess amount of full media was added thereafter to deactivate trypsin. If necessary the cell number is determined using a hemocytometer. Cells were plated at the appropriate seeding density. Nucleic acid/Lipofectamine complexation was gently added to cells by dispensing as droplets and swirling the addition with the tip immersed in the buffer. 24 hours later, cells should be around the 40%-50% confluency. Cells were retransfected 24 hours later, following same procedure for nucleic acid/Lipofectamine complexation but the complex was added to attached cells freshly fed with 400 ul growth media—a forward transfection. Cells were retransfected again 24 hours later, using the same forward transfection technique used in the previous step. RNA extraction was performed 24 hours after third transfection.

### Example 17. Modification Screen of C/EBPα-saRNA

[0495] Modification screen studies were conducted with C/EBPα-saRNA having various modifications. Sequences of the oligonucleotide samples were shown in the following table. DU145 cells were reverse transfected with 50 nM oligonucleotides at seeding, forward transfected 24 hours later, and harvested at 72 hours. CEBPA, ALB, p21 relative expression levels were shown in FIG. 30. 2′O-Me modifications were better tolerated on SS. Mismatch in SS opposite 5′ of AS increased potency of the saRNA.

TABLE 15-1
Sense sequences (m means 2′OMe modified)

| Oligo ID | SS sequence (5′→3′) | SEQ ID No | Notes |
|---|---|---|---|
| NC-500000 | ACUACUGAGUGACAGUAGAUU | 33 | Unmod non-specific |
| | | | control |
| NC-500001 | ACUACUGAGUGACAGUAGAUmU | 262 | 2x OMe non-specific |
| | | | control |
| CEBPA-AW01- | CGGUCAUUGUCACUGGUCAUU | 256 | Unmod AW1 |
| 500000 | | | |
| CEBPA-AW01- | CGGUCAUUGUCACUGGUCAUmU | 249 | 2x OMe in vivo AW1 |
| 500001 | | | |
| CEBPA-AW01- | CmGGmUCmAUmUGmUCmACmUGmGUCmAmU | 263 | SS: 11x OMe |
| 500004 | mU | | AS: 2x OMe |
| CEBPA-AW01- | CmGGmUCmAUmUGmUCmACmUGmGUCmAmU | 263 | SS: 11x OMe |
| 500005 | mU | | AS: 11x OMe |
| CEBPA-AW01- | CmGGUCAmUUmGUCACmUGmGUCAmUmU | 264 | SS: 7x OMe |
| 500006 | | | AS: 7x OMe |
| CEBPA-AW01- | mCGGmUmCAmUmUGmUmCAmCmUGGmUmCA | 265 | SS: 13x OMe |
| 500007 | mUmU | | AS: 5x OMe |
| CEBPA-AW01- | CGGmUCAmUmUGmUCACmUGGmUCAmUmU | 266 | SS: 8x OMe |
| 500008 | | | AS: 5x OMe |
| CEBPA-AW01- | CGGUCmAUUGUCACUmGGUCAmUmU | 267 | SS: 4x OMe |
| 500009 | | | AS: 4x OMe |
| CEBPA-AW01- | CGGmUCmAUUGUCACmUmGGUCAmUmU | 268 | SS: 6x OMe |
| 500010 | | | AS: 2x OMe |
| CEBPA-AW01- | CGGUCAUUGUCACUGGUCUmUmU | 269 | SS: 2x Ome + |
| 500102 | | | mismatch opposite 5′ |
| | | | of AS |
| | | | AS: 2x Ome |
| CEBPA-AW01- | CGGmUCAmUmUGmUCACmUGGmUCUmUmU | 270 | SS: 8x Ome + |
| 500108 | | | mismatch opposite 5′ |
| | | | of AS |
| | | | AS: 5x Ome |

TABLE 15-2
Antisense sequences (m means 2′OMe modified)

| Oligo ID | AS sequence (5′→3′) | SEQ ID No | Notes |
|---|---|---|---|
| NC-500000 | UCUACUGUCACUCAGUAGUUU | 255 | Unmod non-specific |
| | | | control |
| NC-500001 | UCUACUGUCACUCAGUAGUUmU | 271 | 2x OMe non-specific |
| | | | control |
| CEBPA-AW01- | UGACCAGUGACAAUGACCGUU | 257 | Unmod AW1 |
| 500000 | | | |
| CEBPA-AW01- | UGACCAGUGACAAUGACCGUmU | 272 | 2x OMe in vivo AW1 |
| 500001 | | | |
| CEBPA-AW01- | UGACCAGUGACAAUGACCGmUmU | 273 | SS: 11x OMe |
| 500004 | | | AS: 2x OMe |
| CEBPA-AW01- | mUGmACCmAGmUGmACmAAmUGmACCmGmU | 274 | SS: 11x OMe |
| 500005 | mU | | AS: 11x OMe |
| CEBPA-AW01- | UmGACCmAGUmGACAAmUGACCmGmUmU | 275 | SS: 7x OMe |
| 500006 | | | AS: 7x OMe |
| CEBPA-AW01- | mUGACCAGmUGACAAmUGACCGmUmU | 276 | SS: 13x OMe |
| 500007 | | | AS: 5x OMe |
| CEBPA-AW01- | mUGACCAGmUGACAAmUGACCGmUmU | 276 | SS: 8x OMe |
| 500008 | | | AS: 5x OMe |
| CEBPA-AW01- | UGACCmAGUGACAAUmGACCGmUmU | 277 | SS: 4x OMe |
| 500009 | | | AS: 4x OMe |
| CEBPA-AW01- | UGACCAGUGACAAUGACCGmUmU | 273 | SS: 6x OMe |
| 500010 | | | AS: 2x OMe |
| CEBPA-AW01- | UGACCAGUGACAAUGACCGmUmU | 273 | SS: 2x Ome + |
| 500102 | | | mismatch opposite 5′ |
| | | | of AS |
| | | | AS: 2x Ome |
| CEBPA-AW01- | mUGACCAGmUGACAAmUGACCGmUmU | 276 | SS: 8x Ome + |
| 500108 | | | mismatch opposite 5′ |
| | | | of AS |
| | | | AS: 5x Ome |

### Example 18. C/EBPα-saRNA In Vitro Studies

### A). HepG2 Cells

[0496] HepG2 cells were transfected with C/EBPα-saRNA using various methods. Expression of CEBPA transcript in HepG2 cells relative to untransfected HepG2 was measured thereinafter. Normal transfection (T), reserves transfection (RT), one dose (1), two doses (2) at 50 nM final concentration of saRNA were performed. Cells were harvested at 24 h, 48 h and 72 h. Results confirm reverse transfection (RT) is optimal compared to normal transfection (T). Optimal effect of saRNA was detected at 72 hours using both reverse transcription or normal transcription. Double transfection (2 doses, 2^{nd} transfection 24 hours subsequent to 1^{st} transfection) resulted in at least 4 fold increase.

### B) Time Course Studies

[0497] HepG2, DU145 and AML12 cells were transfected with C/EBPα-saRNA (CEBPA-AW01-500000) for time course studies. Cells were seeded at 1.3×105 cells/well (8×104 cells for DU145) in a 24-well plate and reverse transfected, and then forward transfected 24 hours later. Medium was changed 4 hours after each transfection. Cells were harvested at 24, 48, and 72 hours post-seeding. CEBPA, ALB, Cyclin, and p21 mRNA levels were measured.

C). Comparison of HepG2, DU145 and AML12 with CEBPA-saRNA

[0498] HepG2 and AML12 seeding was 1.2×10⁵/well (24 well plate format). DU145 seeding was 0.8×10⁵/well (24 well plate format). Reverse transfection was performed at Day 0, forward transfection at Day 1. 24 hour time point=Day 3. 48 hour time point=Day 4. 72 hour time point=Day 5. 96 hour time point=Day 6. 50 nM of saRNA (scramble or CEBPA) was transfected. Media was changed every 24 hour. qPCR was performed to measure relative quantitation (baseline=untransfected). CEBPA, p21 and albumin expressions were measured. HepG2 data were shown in FIG. 31A-G, DU145 in FIG. 32A-G, and AML12 in FIG. 33A-G.

### Example 19. Formulated C/EBPα-saRNA In Vitro and In Vivo Studies

### A). Formulated CEBPA-saRNA In Vitro Transfection Analysis

[0499] CEBPA-saRNA was formulated in NOV340 (Marina). DU145 and HepG2 cells were reverse transfected with 10 nM, 30 nM, 100 nM and 300 nM of NOV340-CEBPA-saRNAs at seeding, forward transfected 24 hours later, and harvested at 72 hours. Results in FIG. 34A-34F showed no evidence of target engagement of direct target—CEBPA mRNA and proximal target—albumin mRNA and p21 mRNA.

### B). Formulated CEBPA-saRNAs In Vivo Studies in Wild-Type Mice

[0500] CEBPA-saRNA was formulated in dendrimers—MTL-501 and NOV340 (Marina). Two in vivo studies were conducted in wild-type mice (n=5 in each study). Wild-type mice were given triple doses of dendrimer-CEBPA-saRNA and NOV340-CEBPA-saRNA and were sacrificed 2 days after the last doseSerum albumin and albumin mRNA levels were up-regulated, indicating proximal target engagement. However, there was no evidence of direct target engagement.

### C). Formulated CEBPA-saRNA In Vivo Studies in DEN Rats

[0501] One in vivo study was conducted in DEN rats (n=6). HCC model induces liver cirrhosis and spontaneous liver tumors. Rats were fed diethylnitrosamine (DEN) for 7 weeks followed by water for 3 weeks. Treatment with various formulations of CEBPA-saRNA started immediately after tumor development. The rats received three IV injections in 5 days, followed monitoring for 7 days (FIG. 35A). They were then sacrificed for histology and measurements of liver mRNA and serum proteins. Tumor burdens at day 12 were shown in FIG. 35B. Serum bilirubin levels at day 12 were shown in FIG. 35C. ALT liver enzyme levels were shown in FIG. 35D. Serum albumin levels were shown in FIG. 35E. Cholesterol levels at day 12 were shown in FIG. 35F. CEBPA up-regulation, strong inhibition of tumor growth, improvement in liver function (serum bilirubin and ALT) and improved liver metabolism (serum cholesterol) have been observed.

### Example 20. Formulated C/EBPα-saRNA In Vivo Comparisons

### A). Wild Mice

[0502] CEBPA-saRNA was formulated in dendrimers—MTL-501 and NOV340 (Marina)—CEBPA/NOV340. The formulations were administered to wild type mice. Albumin was upregulated by MTL-501 and CEBPA/NOV340. CEBPA and albumin mRNA levels were measured. Total RNA was extracted and 500 ng was reverse transcribed. The results further confirmed that CEBPA and albumin were upregulated by MTL-501 and CEBPA/NOV340. Different dose levels of CEBPA/NOV340 (0.5 mg/kg and 3 mg/kg) were also administered to wile type mice.

### B). DEN Rats

[0503] CEBPA-saRNA was formulated in dendrimers—MTL-501 and NOV340 (Marina)—CEBPA/NOV340. The formulations were administered to DEN rats using the same method as described in Animal experiments. Body weight, liver weight, tumor volume of DEN rats were shown in Table 16 below. Tumor volumes reduced significantly for all formulations/doses.

TABLE 16
Body weight and liver weight of DEN rats

| | | body | liver | liver/ | average |
|---|---|---|---|---|---|
| | | weight | weight | body weight | sd |
| PBS | PBS-1 | 430 | 24.8 | 0.058 | 0.067 |
| | PBS-2 | 385 | 22.6 | 0.059 | 0.011 |
| | PBS-3 | 400 | 32 | 0.080 | |
| | PBS-4 | 355 | 22 | 0.062 | |
| | PBS-5 | 420 | 33 | 0.079 | |
| saRNA + | R + D-1 | 420 | 25.4 | 0.060 | 0.054 |
| Dendrimer | R + D-2 | 440 | 25.6 | 0.058 | 0.005 |
| | R + D-3 | 425 | 22.8 | 0.054 | |
| | R + D-4 | 420 | 24 | 0.057 | |
| | R + D-5 | 400 | 19 | 0.048 | |
| | R + D-6 | 434 | 21.4 | 0.049 | |
| | R + D-7 | 450 | 22 | 0.049 | |
| NOV340 + | N + R 1 mg-1 | 410 | 24.3 | 0.059 | 0.061 |
| saRNA 1 | | | | | |
| mg | | | | | |
| | N + R 1 mg-2 | 425 | 24.4 | 0.057 | 0.004 |
| | N + R 1 mg-3 | 450 | 26 | 0.058 | |
| | N + R 1 mg-4 | 400 | 23.6 | 0.059 | |
| | N + R 1 mg-5 | 390 | 25.4 | 0.065 | |
| | N + R 1 mg-6 | 425 | 28 | 0.066 | |
| NOV340 + | N + R 3 mg-1 | 430 | 23.2 | 0.054 | 0.055 |
| saRNA 3 | | | | | |
| mg | | | | | |
| | N + R 3 mg-2 | 400 | 22 | 0.055 | 0.006 |
| | N + R 3 mg-3 | 425 | 24.2 | 0.057 | |
| | N + R 3 mg-4 | 430 | 23.6 | 0.055 | |
| | N + R 3 mg-5 | 385 | 25.6 | 0.066 | |
| | N + R 3 mg-6 | 410 | 21.4 | 0.052 | |
| | N + R 3 mg-7 | 396 | 18.5 | 0.047 | |
| SNALP-G + | S + R-1 | 420 | 28 | 0.067 | 0.058 |
| saRNA | S + R-2 | 400 | 23.4 | 0.059 | 0.005 |
| | S + R-3 | 415 | 24 | 0.058 | |
| | S + R-4 | 390 | 22.4 | 0.057 | |
| | S + R-5 | 395 | 22 | 0.056 | |
| | S + R-6 | 420 | 21.5 | 0.051 | |
| SNALP-G + | S + SC-1 | 390 | 24.6 | 0.063 | 0.070 |
| scramble | | | | | |
| RNA | | | | | |
| | S + SC-2 | 400 | 29 | 0.073 | 0.010 |
| | S + SC-3 | 405 | 28.4 | 0.070 | |
| | S + SC-4 | 405 | 24.4 | 0.060 | |
| | S + SC-5 | 410 | 35 | 0.085 | |

Total tumor volume of DEN rats

| | | Total tumor | |
|---|---|---|---|
| | | volume | Average |
| | | (mm\hat{ }3) | sd |
| PBS | PBS-1 | 391 | 1020.60 |
| | PBS-2 | 680.5 | 773.49 |
| | PBS-3 | 330.5 | — |
| | PBS-4 | 1733.5 | — |
| | PBS-5 | 1967.5 | — |
| saRNA + | R + D-1 | 378 | 177.36 |
| Dendrimer | R + D-2 | 94.5 | 116.67 |
| | R + D-3 | 64 | — |
| | R + D-4 | 157 | — |
| | R + D-5 | 236 | — |
| | R + D-6 | 64 | — |
| | R + D-7 | 248 | — |
| NOV340 + | N + R 1 mg-1 | 1500 | 515.08 |
| saRNA 1 mg | N + R 1 mg-2 | 331.5 | 521.01 |
| | N + R 1 mg-3 | 94.5 | — |
| | N + R 1 mg-4 | 236 | — |
| | N + R 1 mg-5 | 680.5 | — |
| | N + R 1 mg-6 | 248 | — |
| NOV340 + | N + R 3 mg-1 | 32 | 261.00 |
| saRNA 3 mg | N + R 3 mg-2 | 330.5 | 213.49 |
| | N + R 3 mg-3 | 248 | — |
| | N + R 3 mg-4 | 64 | — |
| | N + R 3 mg-5 | 680.5 | — |
| | N + R 3 mg-6 | 236 | — |
| | N + R 3 mg-7 | 236 | — |
| SNALP-G + | S + R-1 | 680.5 | 306.17 |
| saRNA | S + R-2 | 236 | 220.95 |
| | S + R-3 | 94.5 | — |
| | S + R-4 | 331.5 | — |
| | S + R-5 | 94.5 | — |
| | S + R-6 | 400 | — |
| SNALP-G + | S + SC-1 | 1394 | 1708.40 |
| scramble RNA | | | |
| | S + SC-2 | 4000 | 1408.39 |
| | S + SC-3 | 1967.5 | |
| | S + SC-4 | 500 | |
| | S + SC-5 | 680.5 | |

### Example 21. C/EBPα-saRNA Mechanism of Action Studies

[0504] Experiments are conducted to study C/EBPA-saRNA mechanism of action.

[0505] 1). Analysis of RNA/DNA interaction using chromatin immunoprecipitation (ChIP) enriched genomic DNA using anti-biotin polyclonal antibody:

[0506] C/EBPα-saRNA and scramble-saRNA were labeled with biotin. HepG2 cells were transfected with Biotin-Sramble-saRNA or Biotin-C/EBPA-saRNA. Cells were fixed with 1% formaldehyde to cross-link RNA/DNA complexes. Nuclear extracts were sonicated to shear genomic DNA to 200/300 bp fragments. Fragments were then immunoprecipitated using anti-biotin polyclonal antibody. The immune complex was then purified, reverse cross-linked and incubated with proteinase K. Remaining genomic DNA was purified using Phenol/Chloroform and screened for the presence of the following gene promoters: CEBPA, CDKN1A (p21), AFP, NAB1 (Negative control), IGX1A (EpiTect ChIP negative control Qiagen).

[0507] A western blot confirmed presence of biotin-labelled saRNA in transfected HepG2 cells. Transfected cell extracts were immunoprecipitated using anti-biotin polyclonal antibody. Results were shown in FIG. 36A. 1.5% Agarose gel electrophoresis to separate fragmented genomic DNA from transfected HepG2 cells as shown in FIG. 36B.

[0508] ChIP-Seq of biotin-labeled saRNAs was conducted to study which promoter regions saRNA is associating across the genome. Chromatin immunoprecipitated genomic DNA using anti-biotin was screened for presence of the TSS fragment of C/EBPA, AFP, CDKN1A and NAB1. IGX1A is the internal negative control for this assay to asses back ground. The ChIP-qPCR IGX1A negative control primer measures the amount of non-specific genomic DNA that co-precipitates during the ChIP procedure. IGX1A detects a specific genomic DNA sequence within an ORF-free intergenic region or “promoter desert” lacking any known or predicted structural genes on Human chromosome 12 Ref seq: NC_000012.11. Results show that only C/EBPA promoter region was present.

[0509] 2). ChIP-Seq with anti Pol-II is conducted to identify regions of promoter activation and transcriptional activity. Other antibodies can be used for evidence of epigenetic changes, such as H3K4me3/H3KAc/H3K27me, etc.

[0510] 3). RIP instead of ChIP-Seq in 1) and 2) is conducted to measure enrichment of saRNA and various proteins at ncRNA once they are identified.

[0511] 4). ChIP-qPCR of H3K4Me3 is conducted to validate genes/promoters identified in 2). saRNAs are not biotin-labeled.

[0512] 5). Experiments including strand-specific RT-PCR, RACE-PCR, and RNA-FISH are conducted for identification and characterization of potential antisense ncRNAs for C/EBPA promoter and any other off-target promoters identified above.

[0513] 6). Cells are transfected with siRNA to all Ago proteins as well as C/EBPA-saRNA to identify which Ago are required for upregulating C/EBPA expression.

[0514] 7). Cells are transfected with CRISPR to mutate target promoter sequence whilst not mutating translated protein to determine if saRNA is acting through on-target transcriptional regulation.

[0515] 8). Directional RT-PCR shows strand specific transcripts at promoter region. Should be evidence of a ncRNA

[0516] 9). Nuclear run is performed in order to study where transcriptional activity is occurring across genome. A ribosome blocker is also used to show any transcriptional off target effects of saRNA.

[0517] 10). Cells are transfected with a gapmer targeted to ncRNA, e.g. CEBPA-AS1, to degrade the ncRNA. saRNA transfection and CEBPA upregulation are studied to determine if there is any impact when the ncRNA is degraded.

### Example 22. CEBPA for Surgical Supportive Care

### Animal Experiments

[0518] A clinically relevant rat cirrhotic model was used as described herein. Male Wistar rats (150-180 g) at 6 weeks of age were obtained from the Animal Center of National Taiwan University. The rats were housed in standard conditions, and all the experiments were conducted in accordance with the “Guide for the Care and Use of Laboratory Animals” prepared by the Institutional Animal Care and Use Committee of National Taiwan University. These animals were given diethylnitrosamine (DEN) solution (Sigma, St Louis, MO) daily as the sole source of drinking water for 9 weeks, starting with 100 ppm in the first week. The average BW of the animals was measured once a week and the concentration of DEN in their drinking water was adjusted in proportion to the BW each week relative to that of the first week. After 9 weeks of DEN administration, liver cirrhosis could be noted at that time. The rats were divided into three groups of ten, randomly. Group 1 received C/EBPa-saRNA treatment, group 2 received scramble-saRNA treatment and group 3 received PBS instead and served as control.

[0519] For in vivo therapy C/EBPa-saRNA was reconstituted with 100 uL of RNase/DNase free H₂O; 50 lL of 20 nM saRNA oligonucleotide and 50 uL of TEA core PAMAM dendrimer, previously described.

[0520] Ten cirrhotic animals were treated with 3× doses by way of tail vein injections in the first week. Control animals (n=10) were injected with an equal volume of phosphate-buffered saline (PBS) or scramble-saRNA.

[0521] 7 days after the last saRNA-C/EBPα:Dendrimer injection, Partial (70%) hepatectomies were performed on all rats after midline laparotomy by means of aseptic removal of the median and left lateral lobes according to the procedure of Higgins and Anderson (Higgins G M and Andreson R M, “Experimental pathology of the liver: Restoration of the liver of the white rat following partial surgical removal”, Arch. Pathol. vol. 12:186-202 (1931), the contents of which are incorporated herein by reference in their entirety). Briefly, an upper median incision was made on the abdomen with the animals in supine position under general anesthesia (ketamine 40 mg/kg i.p.), followed by mobilization of the median and left lobes of the liver through careful dissection on the surrounding ligaments. The median and left lobes were then ligated at the base and resected. The harvested hepatic tissue was then divided into several portions (labeled as samples on postoperative day 0, POD 0) for subsequent histological examination and immersed in 10% formalin, while the remainder was rapidly frozen in liquid nitrogen and stored at −80° C. until needed for protein and molecular analyses to compare with the tissue obtained 2 week later when the animals were sacrificed (labeled as samples on postoperative day 7, POD 7) with CO₂ inhalation. The liver lobes resected during hepatectomy as well as those excised at the end of the follow-up period were also weighed with the liver-to-body weight ratio verified (LW/BW×100%) for comparison. Change in liver weight was evaluated as the hepatic regeneration rate (RR). RR is defined as liver weight per 100 g of the body weight at euthanization/preoperative estimated liver weight per 100 g of the body weight (Anderson K J et al., “Postoperative but not preoperative treatment with sorafenib inhibits liver regeneration in rat”, J Surg Res, vol. 191(2): 331-338 (2014), the contents of which are incorporated herein by reference in their entirety). The preoperatively estimated total liver weight was calculated from the resected liver weight (70% of preoperative total liver weight). In this model, the beginning of the process of reconstitution occurs after 12 to 16 hours, reaching the first peak of synthesis of DNA after 24 hours of the regenerative stimulus, followed by another less intense by 36 to 48 hours. The recovery of liver mass removed happens within two to three weeks.

### Immunohistochemistry and Histological Staining.

[0522] For detecting the regeneration capacity of liver after partial resection, all rats were given a single IP injection of BrdU (Sigma; St Louis, MO) at a dosage of 100 mg/kg body weight at 2 hr before sacrifice on 7^{th} day after hepatectomy. Liver lobes that were resected during hepatectomy as well as those that were excised at the end of the follow-up period were fixed, paraffin embedded, and processed to 6 μm sections as follows. The immunostaining of BrdU was performed for post-hepatectomic livers. For staining of BrdU, sections were incubated with a monoclonal mouse anti-BrdU 1:100 (MO744 clone BU20A; DAKO Sweden AB) for 60 min, followed by incubation of the secondary antibody, a biotinylated polyclonal rabbit anti-mouse 1:400 (E0464; DAKO Sweden AB), for 25 min. Sections were then incubated with ABC vectastain standard kit (PK 6100; Vector Laboratories, Burlingame, CA) for 30 min and developed with DAB Immpact (Vector Laboratories) substrate for 5 min. Sections were counterstained with hematoxylin (Mayers Hematoxylin; Histolab, Göteborg, Sweden). The labeling index of BrdU was calculated as the ratio between the positively stained hepatocyte nuclei, respectively, to the total numbers of hepatocytes. The cumulative mean value from 15 randomly counted fields of the sections was calculated under light microscopy (400×). For IHC demonstration of Ki-67 or Proliferating cell nuclear antigen (PCNA), tissue sections were quenched for endogenous peroxidase and placed in an antigen retrieval solution (0.01 M ci-trate buffer, pH 6.0) for 15 min in a microwave oven at 100 C at 600 W. After incubation in the casein block, Monoclonal mouse anti-rat Ki-67 specific antibody (clone MIB-5, isotype IgG1; Dako, Glostrup, Denmark) or mouse MAb anti-PCNA (clone PC10; DAKO) was applied to the sections at dilutions of 1:20 and 1:5000, respectively. Sections were incubated with the primary antibody for 4 days at 4° C. Sections were washed, positive signals were visualized using the EnVision+ horseradish peroxidase labelled anti-mouse detection system (Dako), and the sections were counterstained with haematoxylin, dehydrated, and mounted. The number of cells was counted in five different viewpoints per each slide and the ratio of PCNA or Ki-67 positive/total hepatocytes was calculated.

### Biochemical Analysis of Serum

[0523] Immediately prior to hepatectomy and sacrifice, blood samples were collected by venous puncture and immediately centrifuged at 1300×g at 4° C., plasma was kept at −20° C. for biochemical analyses. Albumin, Alanine aminotranferease (ALT), aspartate aminotransferase (AST), total bilirubin and Gamma-glutamyl transpeptidase (γ-GT) levels were determined using commercial enzymatic kits with a automatic biochemistry analyzer (200FR; Toshiba, Japan). Blood levels before hepatectomy were stated as standard levels.

### Results

[0524] As shown in Example 1, intravenous injection of C/EBPa-saRNA in male Wistar rats bearing liver cirrhosis/HCC promoted increased circulating levels of albumin, amelioration of liver function, and reduced tumor burden.

The Survival of Cirrhotic Animals after 70% Hepatectomy:

[0525] 10 rates from each group were operated for verification of the survival rate. After 70% hepatectomy, the cirrhotic animals were monitored for survival rate. 50% of the control animal (5/10) and scrambled-saRNA group (5/10) were dead after 7^{th} day, however, the survival rates in animals treated by C/EBPA-saRNA was 100% (10/10). The decrease of surgical mortality in cirrhotic animals was noted after treatment of C/EBPA-saRNA significantly (p=0.03 versus control group or scrambled-saRNA group by Fisher's exact test).

### Remnant Liver Regeneration:

[0526] Seven days after hepatectomy, the regeneration rate showed a significant increase after C/EBPA-saRNA treatment in-group 1 compared with that of group 2 (p=0.006) and group 3 (p=0.01), whereas there was no significant difference between group 2 and group 3. The increased ratio in group 3 cannot be explained by changes in body weight that showed no significant difference among the three groups before and after hepatectomy (data no shown).

### Brd U Labeling Index:

[0527] The number of Brd U labeling cells were much higher in C/EBPA-saRNA group 7 days post hepatectomy in contrast to control group (p=0.001) and scrambled-saRNA group (p=0.024). Some areas in the livers obtained from the control group contained no Brd U positively stained cells.

### PCNA and Ki67 Assays:

[0528] The number of PCNA positively stained cells was much higher in C/EBPA-saRNA group 7 days post hepatectomy. PCNA labeling index was significantly higher in C/EBPA-saRNA group in contrast to control group (p=0.017) but not to scrambled-saRNA group (p=0.06). Ki-67 labeling index was significantly higher in C/EBPA-saRNA group in contrast to control group (p=0.001) and scrambled-saRNA group (p=0.014) both.

[0529] Pretreatment liver weight/body weight, post-treatment liver weight/body weight, regeneration rate, and the number of BrdU, PCNA, or Ki-67 labeling index were shown in Table 17.

TABLE 17
Liver weight/body weight pre and post treatment

| | | | pre LW/BW | post LW/BW |
|---|---|---|---|---|
| CEBPA | 1 | a-2 | 4 | 3.5 |
| | 2 | a-3 | 4.5 | 4 |
| | 3 | a-4 | 5 | 4 |
| | 4 | a-5 | 4.67 | 3.5 |
| | 5 | b-2 | 4.5 | 3.6 |
| | 6 | b-3 | 3.8 | 2.9 |
| | 7 | b-4 | 4.2 | 3 |
| | 8 | c-1 | 5.2 | 4.6 |
| | 9 | e-3 | 4.8 | 4 |
| | 10 | e-5 | 4.4 | 3.9 |
| | | MEAN | 4.51 | 3.7 |
| | | SD | 0.43 | 0.51 |
| Control | 1 | c-2 | 4.5 | 3 |
| | 2 | c-4 | 5 | 2.5 |
| | 3 | c-5 | 5.2 | 2.9 |
| | 4 | d-1 | 4.4 | 3 |
| | 5 | d-2 | 4.8 | 4 |
| | | MEAN | 4.78 | 1.16 |
| | | SD | 0.30 | 0.03 |
| Scrambled | 1 | f-1 | 5 | 4 |
| | 2 | f-2 | 4.2 | 3 |
| | 3 | f-3 | 4 | 2.8 |
| | 4 | f-4 | 4.3 | 3 |
| | 5 | f-5 | 4.7 | 2.9 |
| | | MEAN | 4.44 | 3.14 |
| | | SD | 0.40 | 0.49 |

Table 17-2 Regeneration rate, and the number of BrdU, PCNA, or Ki-67 labeling index

| | | | | Regeneration | | | |
|---|---|---|---|---|---|---|---|
| | | | | rate | BrdU | PCNA | Ki-67 |
| CEBPA | 1 | a-2 | | 0.88 | 3 | 7 | 12 |
| | 2 | a-3 | | 0.89 | 2.8 | 6 | 15 |
| | 3 | a-4 | | 0.80 | 2.6 | 4.8 | 9 |
| | 4 | a-5 | | 0.75 | 2.6 | 4.5 | 11 |
| | 5 | b-2 | | 0.80 | 2.4 | 3.6 | 9.5 |
| | 6 | b-3 | | 0.76 | 2 | 3 | 13 |
| | 7 | b-4 | | 0.71 | 2.6 | 4.1 | 13 |
| | 8 | c-1 | | 0.88 | 2.2 | 3.3 | 11 |
| | 9 | e-3 | | 0.83 | 1.9 | 3 | 7.4 |
| | 10 | e-5 | | 0.89 | 2.3 | 3.5 | 7.2 |
| | | MEAN | | 0.82 | 2.44 | 4.28 | 10.81 |
| | | SD | | 0.06 | 0.35 | 1.33 | 2.54 |
| Control | 1 | c-2 | | 0.67 | 1.4 | 2 | 7 |
| | 2 | c-4 | | 0.50 | 1.6 | 2 | 5.5 |
| | 3 | c-5 | | 0.56 | 2 | 3 | 2.4 |
| | 4 | d-1 | | 0.68 | 1.5 | 2.8 | 4 |
| | 5 | d-2 | | 0.83 | 2 | 3 | 8.2 |
| | | MEAN | | 0.65 | 1.7 | 2.56 | 5.42 |
| | | SD | | 0.11 | 0.25 | 0.46 | 2.07 |
| | | | p = | 0.01 | 0.0012 | 0.016888659 | 0.001583619 |
| Scrambled | 1 | f-1 | | 0.80 | 1.8 | 3.3 | 9 |
| | 2 | f-2 | | 0.71 | 2.2 | 2.4 | 8.5 |
| | 3 | f-3 | | 0.70 | 2 | 2.9 | 8 |
| | 4 | f-4 | | 0.70 | 2 | 2.9 | 4.7 |
| | 5 | f-5 | | 0.62 | 2.1 | 3.5 | 5.6 |
| | | MEAN | | 0.71 | 1.02 | 3 | 7.16 |
| | | SD | | 0.07 | 0.15 | 0.42 | 1.90 |
| | | | p = | 0.01 | 0.024017 | 0.060041152 | 0.014500321 |

### Discussion

[0530] To test the potential therapeutic value of the C/EPBa-saRNA, an in vivo study using a cirrhotic rat model was subsequently performed. For targeted delivery of C/EPBa-saRNA the duplex RNA molecule was linked to cationic PAMAM dendrimers. These nanoparticles have previously been evaluated where biodistribution studies demonstrate that they preferentially accumulate in peripheral blood mononuclear cells and the liver with no discernible toxicity. Intravenous injection of C/EPBa-saRNA-dendrimers over a course of 1 week showed a significant improvement of survival rate after 70% hepatectomy compared to PBS control or scramble-saRNA-dendrimer control groups.

[0531] Furthermore, the improving in liver regeneration was detected by increase in Brd U, PCNA and Ki-67 staining in the liver sections from the C/EBPa-saRNA-treated group. From a clinical perspective, this represents an attractive therapeutic avenue to decrease the surgical mortality of cirrhotic patients and accelerate the recovery form liver resection.

[0532] The results suggest that repeated treatments of C/EPBa-saRNA may have a positive impact on the regeneration of fibrotic liver in the rats after liver resection, and it will decrease the surgical mortality in cirrhotic animals.

### Hypothesis Around CEBPA Treatment

[0533] Genes involved in HCC include CEBPA, CEBPB and HNF4. Not willing to be bound to any theory, as illustrated in FIG. 37, CEBPA is involved in not only HCC cancer including differentiated cancer (60%) and undifferentiated cancer (40%) but also liver failure causing failed production of albumin and coagulation factors. FIG. 37 also included a patient stratification for various therapies. Child-Pugh is a scoring system for liver cirrhosis. A is healthy, C is very unhealthy. Differentiation refers to the HCC tumor. % are estimates of proportions of stated differentiation relative to advanced HCC patient population. CEBPA-saRNA may be used in distinct proliferative conditions such as in HCC with low CEBPA expression and in HCC with high CEBPA following abrogation of CEBPB-LIP-20KD. In the meantime, CEBPA-saRNA may be used to assist liver regeneration following major liver resection. It is capable to be clinically useful in stopping proliferation or enhancing proliferation, according to the context. Therefore, CEBPA may be used as supportive care as it improved regeneration rate following removal of 70% of rat livers.

### Example 23. Additional saRNA Sequences

[0534] Nucleotide walk around bioinformatics hotspots (AW1, AW2, PR2) was conducted. The saRNA sequences were prescreened for cross reactivity and minimized potential off-target effects. Sequences of the saRNAs were shown in Table 18.

TABLE 18
Sense sequences (lower case means 2′O-Me modification)

| Duplex | | | | |
|---|---|---|---|---|
| ID/Target | Name | Sense-ID | Sense sequence | SEQ ID NO |
| XD-03287 | CEBPA-AW01- | | | |
| CEBPA | 500000 | | | |
| XD-03291 | NC-500000 | | | |
| scrambe1 | | | | |
| XD-03300 | CEBPA-AW01- | X09312 | GUCACUGGUCAGCUCCAGCUU | 278 |
| CEBPA | 420000 | | | |
| XD-03301 | CEBPA-AW01- | X09314 | CAUUGUCACUGGUCAGCUCUU | 279 |
| CEBPA | 460000 | | | |
| XD-03302 | CEBPA-AW01- | X09316 | GCGGUCAUUGUCACUGGUCUU | 280 |
| CEBPA | 510000 | | | |
| XD-03303 | CEBPA-AW01- | X09318 | GGCGGUCAUUGUCACUGGUUU | 281 |
| CEBPA | 520000 | | | |
| XD-03304 | CEBPA-AW01- | X09320 | AGGCGGUCAUUGUCACUGGUU | 282 |
| CEBPA | 530000 | | | |
| XD-03305 | CEBPA-AW01- | X09322 | CAGGCGGUCAUUGUCACUGUU | 283 |
| CEBPA | 540000 | | | |
| XD-03306 | CEBPA-AW01- | X09324 | GCAGGCGGUCAUUGUCACUUU | 284 |
| CEBPA | 550000 | | | |
| XD-03307 | CEBPA-AW01- | X09326 | CGCAGGCGGUCAUUGUCACUU | 285 |
| CEBPA | 560000 | | | |
| XD-03308 | CEBPA-AW01- | X09328 | GCGCAGGCGGUCAUUGUCAUU | 286 |
| CEBPA | 570000 | | | |
| XD-03309 | CEBPA-AW01- | X09330 | UGCGCAGGCGGUCAUUGUCUU | 287 |
| CEBPA | 580000 | | | |
| XD-03310 | CEBPA-AW01- | X09332 | UUGCGCAGGCGGUCAUUGUUU | 288 |
| CEBPA | 590000 | | | |
| XD-03311 | CEBPA-AW02- | X09334 | AUUCAUCCUCCUCGCGGGGUU | 289 |
| CEBPA | 400000 | | | |
| XD-03312 | CEBPA-AW02- | X09336 | GAUUCAUCCUCCUCGCGGGUU | 290 |
| CEBPA | 410000 | | | |
| XD-03313 | CEBPA-AW02- | X09338 | GGAUUCAUCCUCCUCGCGGUU | 291 |
| CEBPA | 420000 | | | |
| XD-03314 | CEBPA-AW02- | X09340 | AGGAUUCAUCCUCCUCGCGUU | 292 |
| CEBPA | 430000 | | | |
| XD-03315 | CEBPA-AW02- | X09342 | AAGGAUUCAUCCUCCUCGCUU | 293 |
| CEBPA | 440000 | | | |
| XD-03316 | CEBPA-AW02- | X09344 | AAAGGAUUCAUCCUCCUCGUU | 294 |
| CEBPA | 450000 | | | |
| XD-03317 | CEBPA-AW02- | X09346 | UGAAAGGAUUCAUCCUCCUUU | 295 |
| CEBPA | 460000 | | | |
| XD-03318 | CEBPA-AW02- | X09348 | CUGAAAGGAUUCAUCCUCCUU | 296 |
| CEBPA | 480000 | | | |
| XD-03319 | CEBPA-AW02- | X09350 | GCUGAAAGGAUUCAUCCUCUU | 297 |
| CEBPA | 490000 | | | |
| XD-03320 | CEBPA-AW02- | X09352 | AGCUGAAAGGAUUCAUCCUUU | 298 |
| CEBPA | 500000 | | | |
| XD-03321 | CEBPA-AW02- | X09354 | CAGCUGAAAGGAUUCAUCCUU | 299 |
| CEBPA | 510000 | | | |
| XD-03322 | CEBPA-AW02- | X09356 | CCAGCUGAAAGGAUUCAUCUU | 300 |
| CEBPA | 520000 | | | |
| XD-03323 | CEBPA-AW02- | X09358 | GCCAGCUGAAAGGAUUCAUUU | 301 |
| CEBPA | 530000 | | | |
| XD-03324 | CEBPA-AW02- | X09360 | CGCCAGCUGAAAGGAUUCAUU | 302 |
| CEBPA | 540000 | | | |
| XD-03325 | CEBPA-AW02- | X09362 | GCGCCAGCUGAAAGGAUUCUU | 303 |
| CEBPA | 550000 | | | |
| XD-03326 | CEBPA-AW02- | X09364 | AGCGCCAGCUGAAAGGAUUUU | 304 |
| CEBPA | 560000 | | | |
| XD-03327 | CEBPA-AW02- | X09366 | CAGCGCCAGCUGAAAGGAUUU | 305 |
| CEBPA | 570000 | | | |
| XD-03328 | CEBPA-AW02- | X09368 | CCAGCGCCAGCUGAAAGGAUU | 306 |
| CEBPA | 580000 | | | |
| XD-03329 | CEBPA-AW02- | X09370 | GCCAGCGCCAGCUGAAAGGUU | 307 |
| CEBPA | 590000 | | | |
| XD-03330 | CEBPA-AW02- | X09372 | GGCCAGCGCCAGCUGAAAGUU | 308 |
| CEBPA | 600000 | | | |
| XD-03331 | CEBPA-PRO2- | X09374 | CUUCAUCCUCCUCGCGGGGUU | 309 |
| CEBPA | 400000 | | | |
| XD-03332 | CEBPA-PRO2- | X09376 | GGCUUCAUCCUCCUCGCGGUU | 310 |
| CEBPA | 420000 | | | |
| XD-03333 | CEBPA-PRO2- | X09378 | AGCUGCUUGGCUUCAUCCUUU | 311 |
| CEBPA | 500000 | | | |
| XD-03334 | CEBPA-PRO2- | X09380 | CGCCAGCUGCUUGGCUUCAUU | 312 |
| CEBPA | 540000 | | | |
| XD-03335 | CEBPA-PRO2- | X09382 | AGCGCCAGCUGCUUGGCUUUU | 313 |
| CEBPA | 560000 | | | |
| XD-03292 | Fluc MiNA | X09208 | CuUACGcUGAGUACUUCGAsusu | 314 |
| Fluc | modified | | | |
| XD-00033 | EEL, transfection | X00122 | GGAuGAAGuGGAGAuuAGudTsdT | 315 |
| AHA1 | control | | | |

Antisense sequences (lower case means 2′O-Me modification)

| Duplex | | Antisense- | | |
|---|---|---|---|---|
| ID/Target | Name | ID | Antisense sequence | SEQ ID NO |
| XD-03287 | CEBPA-AW01- | | positive control | |
| CEBPA | 500000 | | | |
| XD-03291 | | | scrambled control | |
| scrambe1 | NC-500000 | | | |
| XD-03300 | CEBPA-AW01- | X09313 | GCUGGAGCUGACCAGUGACUU | 316 |
| CEBPA | 420000 | | | |
| XD-03301 | CEBPA-AW01- | X09315 | GAGCUGACCAGUGACAAUGUU | 317 |
| CEBPA | 460000 | | | |
| XD-03302 | CEBPA-AW01- | X09317 | GACCAGUGACAAUGACCGCUU | 318 |
| CEBPA | 510000 | | | |
| XD-03303 | CEBPA-AW01- | X09319 | ACCAGUGACAAUGACCGCCUU | 319 |
| CEBPA | 520000 | | | |
| XD-03304 | CEBPA-AW01- | X09321 | CCAGUGACAAUGACCGCCUUU | 320 |
| CEBPA | 530000 | | | |
| XD-03305 | CEBPA-AW01- | X09323 | CAGUGACAAUGACCGCCUGUU | 321 |
| CEBPA | 540000 | | | |
| XD-03306 | CEBPA-AW01- | X09325 | AGUGACAAUGACCGCCUGCUU | 322 |
| CEBPA | 550000 | | | |
| XD-03307 | CEBPA-AW01- | X09327 | GUGACAAUGACCGCCUGCGUU | 323 |
| CEBPA | 560000 | | | |
| XD-03308 | CEBPA-AW01- | X09329 | UGACAAUGACCGCCUGCGCUU | 324 |
| CEBPA | 570000 | | | |
| XD-03309 | CEBPA-AW01- | X09331 | GACAAUGACCGCCUGCGCAUU | 325 |
| CEBPA | 580000 | | | |
| XD-03310 | CEBPA-AW01- | X09333 | ACAAUGACCGCCUGCGCAAUU | 326 |
| CEBPA | 590000 | | | |
| XD-03311 | CEBPA-AW02- | X09335 | CCCCGCGAGGAGGAUGAAUUU | 327 |
| CEBPA | 400000 | | | |
| XD-03312 | CEBPA-AW02- | X09337 | CCCGCGAGGAGGAUGAAUCUU | 328 |
| CEBPA | 410000 | | | |
| XD-03313 | CEBPA-AW02- | X09339 | CCGCGAGGAGGAUGAAUCCUU | 329 |
| CEBPA | 420000 | | | |
| XD-03314 | CEBPA-AW02- | X09341 | CGCGAGGAGGAUGAAUCCUUU | 330 |
| CEBPA | 430000 | | | |
| XD-03315 | CEBPA-AW02- | X09343 | GCGAGGAGGAUGAAUCCUUUU | 331 |
| CEBPA | 440000 | | | |
| XD-03316 | CEBPA-AW02- | X09345 | CGAGGAGGAUGAAUCCUUUUU | 332 |
| CEBPA | 450000 | | | |
| XD-03317 | CEBPA-AW02- | X09347 | AGGAGGAUGAAUCCUUUCAUU | 333 |
| CEBPA | 460000 | | | |
| XD-03318 | CEBPA-AW02- | X09349 | GGAGGAUGAAUCCUUUCAGUU | 334 |
| CEBPA | 480000 | | | |
| XD-03319 | CEBPA-AW02- | X09351 | GAGGAUGAAUCCUUUCAGCUU | 335 |
| CEBPA | 490000 | | | |
| XD-03320 | CEBPA-AW02- | X09353 | AGGAUGAAUCCUUUCAGCUUU | 336 |
| CEBPA | 500000 | | | |
| XD-03321 | CEBPA-AW02- | X09355 | GGAUGAAUCCUUUCAGCUGUU | 337 |
| CEBPA | 510000 | | | |
| XD-03322 | CEBPA-AW02- | X09357 | GAUGAAUCCUUUCAGCUGGUU | 338 |
| CEBPA | 520000 | | | |
| XD-03323 | CEBPA-AW02- | X09359 | AUGAAUCCUUUCAGCUGGCUU | 339 |
| CEBPA | 530000 | | | |
| XD-03324 | CEBPA-AW02- | X09361 | UGAAUCCUUUCAGCUGGCGUU | 340 |
| CEBPA | 540000 | | | |
| XD-03325 | CEBPA-AW02- | X09363 | GAAUCCUUUCAGCUGGCGCUU | 341 |
| CEBPA | 550000 | | | |
| XD-03326 | CEBPA-AW02- | X09365 | AAUCCUUUCAGCUGGCGCUUU | 342 |
| CEBPA | 560000 | | | |
| XD-03327 | CEBPA-AW02- | X09367 | AUCCUUUCAGCUGGCGCUGUU | 343 |
| CEBPA | 570000 | | | |
| XD-03328 | CEBPA-AW02- | X09369 | UCCUUUCAGCUGGCGCUGGUU | 344 |
| CEBPA | 580000 | | | |
| XD-03329 | CEBPA-AW02- | X09371 | CCUUUCAGCUGGCGCUGGCUU | 345 |
| CEBPA | 590000 | | | |
| XD-03330 | CEBPA-AW02- | X09373 | CUUUCAGCUGGCGCUGGCCUU | 346 |
| CEBPA | 600000 | | | |
| XD-03331 | CEBPA-PR02- | X09375 | CCCCGCGAGGAGGAUGAAGUU | 347 |
| CEBPA | 400000 | | | |
| XD-03332 | CEBPA-PR02- | X09377 | CCGCGAGGAGGAUGAAGCCUU | 348 |
| CEBPA | 420000 | | | |
| XD-03333 | CEBPA-PR02- | X09379 | AGGAUGAAGCCAAGCAGCUUU | 349 |
| CEBPA | 500000 | | | |
| XD-03334 | CEBPA-PR02- | X09381 | UGAAGCCAAGCAGCUGGCGUU | 350 |
| CEBPA | 540000 | | | |
| XD-03335 | CEBPA-PR02- | X09383 | AAGCCAAGCAGCUGGCGCUUU | 351 |
| CEBPA | 560000 | | | |
| XD-03292 | Fluc MiNA | X09209 | UcGAAGuAcUCAGcGUAAgsusu | 352 |
| Fluc | modified | | | |
| XD-00033 | EEL, transfection | X00123 | ACuAAUCUCcACUUcAUCCdTsdT | 353 |
| AHA1 | control | | | |

[0535] The saRNAs were screened with a bDNA assay system in quadruplicate in HepG2 cells, wherein CEPBPA mRNA (target), albumin mRNA (downstream), and p21 mRNA (downstream) levels were measured. The results were shown in FIG. 38A-38C. They were also screened in DU145 cells, wherein CEBPA mRNA (target) and p21 mRNA (downstream) levels were measured. All cells were reverse transfected at 0 hr and forward transfected at 24 hr followed by harvest at 72 hr. The results were shown in FIG. 65D-65E. Two concentrations of the saRNAs were used: 8 nM and 50 nM.

[0536] Dose response studies of some saRNAs were conducted with bDNA assay system in quadruplicate in HepG2 and DU145 cells. CEBPA mRNA (FIG. 39A), albumin mRNA (FIG. 39B), and p21 mRNA (FIG. 39C) levels in HepG2 cells were measured. Results were normalized to GAPDH and GAPDH mRNA levels in HepG2 cells were shown in FIG. 39D. CEBPA mRNA (FIG. 39E) and p21 mRNA (FIG. 39F) levels in DU145 cells were measured. Results were normalized to GAPDH and GAPDH mRNA levels in DU145 cells were shown in FIG. 39G. All cells were reverse transfected at 0 hr and forward transfected at 24 hr followed by harvest at 72 hr. Four concentrations of the saRNA were used: 1.25 nM, 2.5 nM, 5 nM and 10 nM.

[0537] HepG2 cells were reverse transfected with 50 nM CEBPA-AW01-510000 (XD-03302) at seeding, forward transfected 24 hours later, and harvested at 72 hours. Activation of ALB, CEBPA, ecCEBPA, and STAT3 were observed as shown in FIG. 40.

[0538] The saRNA sequences in Table 18 were modified, for example but not limited to, with 2′O-Me modifications, inverted abasic modifications as shown in Table 19. HepG2 and DU145 cells were transfected with the chemically modified saRNA sequences at various concentrations (5 nM and 10 nM) and CEBPA mRNA, p21 mRNA, albumin mRNA, and AFP mRNA levels were measured with bDNA assays. Results were shown in the tables (Tables 20-26) below. Expression in mock-treated cells=1.

TABLE 19
CEBPA saRNA modifications - sense sequences (lower case means 2′O-Me
modification)

| | | Sense | | SEQ ID | |
|---|---|---|---|---|---|
| Target | Duplex ID | ID | Sense sequence | No. | Notes |
| CEBPA | XD-03287 | | | | Positive control |
| CEBPA | XD-03302 | X09316 | GCGGUCAUUGUCACUGGU | 280 | |
| | | | CUU | | |
| CEBPA | XD-03317 | X09346 | UGAAAGGAUUCAUCCUCC | 295 | |
| | | | UUU | | |
| CEBPA | XD-03318 | X09348 | CUGAAAGGAUUCAUCCUC | 296 | |
| | | | CUU | | |
| CEBPA | XD-03330 | X09372 | GGCCAGCGCCAGCUGAAA | 308 | |
| | | | GUU | | |
| Fluc | XD-03292 | X09208 | CuUACGcUGAGUACUUCGA | 314 | Fluc MiNA |
| | | | susu | | modified |
| AHA1 | XD-00033 | X00122 | GGAuGAAGuGGAGAuuAGud | 315 | EEL, transfection |
| | | | TsdT | | control |
| CEBPA | XD-03923 | X11262 | (invabasic)CGGUCAUUGUCA | 258 | XD-03287_IA |
| | | | CUGGUCAUU | | |
| CEBPA | XD-03924 | X11263 | (invabasic)GCGGUCAUUGUC | 354 | XD-03302_IA |
| | | | ACUGGUCUU | | |
| CEBPA | XD-03925 | X11264 | (invabasic)UGAAAGGAUUCA | 355 | XD-03317_IA |
| | | | UCCUCCUUU | | |
| CEBPA | XD-03926 | X11265 | (invabasic)CUGAAAGGAUUC | 356 | XD-03318_IA |
| | | | AUCCUCCUU | | |
| CEBPA | XD-03927 | X11266 | (invabasic)GGCCAGCGCCAG | 357 | XD -03330_IA |
| | | | CUGAAAGUU | | |
| CEBPA | XD-03928 | X11267 | (invabasic)CgGuCaUuGuCaCu | 358 | XD- |
| | | | GgUCauu | | 03287_IA_MiNA |
| CEBPA | XD-03929 | X11268 | (invabasic)GCgGuCaUuGuCaC | 359 | XD- |
| | | | uGgUCuu | | 03302_IA_MiNA |
| CEBPA | XD-03930 | X11269 | (invabasic)UgAaAgGaUuCAuC | 360 | XD- |
| | | | CuCCuuu | | 03317_IA_MiNA |
| CEBPA | XD-03931 | X11270 | (invabasic)CuGaAaGgAuuCAu | 361 | XD- |
| | | | CCuCCuu | | 03318_IA_MiNA |
| CEBPA | XD-03932 | X11271 | (invabasic)GgCCAgCgCCAgCu | 362 | XD- |
| | | | GaAaGuu | | 03330_IA_MiNA |
| CEBPA | XD-03933 | X11272 | (invabasic)cgGuCAUUGuCACu | 363 | XD- |
| | | | GGUCAuu | | 03287_IA_AXO1 |
| CEBPA | XD-03934 | X11273 | (invabasic)gcGgUCAUUgUCAc | 364 | XD- |
| | | | UGGUCuu | | 03302_IA_AXO1 |
| CEBPA | XD-03935 | X11274 | (invabasic)ugAaAGGAUuCAUc | 365 | XD- |
| | | | CUCCUuu | | 03317_IA_AXO1 |
| CEBPA | XD-03936 | X11275 | (invabasic)cuGaAAGGAuUCAu | 366 | XD- |
| | | | CCUCCuu | | 03318_IA_AXO1 |
| CEBPA | XD-03937 | X11276 | (invabasic)ggCcAGCGCcAGCu | 367 | XD- |
| | | | GAAAGuu | | 03330_IA_AXO1 |
| CEBPA | XD-03938 | X11277 | (invabasic)cgGucAuuGucAcuG | 368 | XD- |
| | | | GucAuu | | 03287_IA_AXO2 |
| CEBPA | XD-03939 | X11278 | (invabasic)gcGGucAuuGucAcu | 369 | XD- |
| | | | GGucuu | | 03302_IA_AXO2 |
| CEBPA | XD-03940 | X11279 | (invabasic)ugAAAGGAuucAuc | 370 | XD- |
| | | | cuccuuu | | 03317_IA_AXO2 |
| CEBPA | XD-03941 | X11280 | (invabasic)cuGAAAGGAuucAu | 371 | XD- |
| | | | ccuccuu | | 03318_IA_AXO2 |
| CEBPA | XD-03942 | X11281 | (invabasic)ggccAGcGccAGcuG | 372 | XD- |
| | | | AAAGuu | | 03330_IA_AXO2 |

CEBPA saRNA modifications - antisense sequences (lower case means 2′O-Me
modification)

| | | Antisense | | SEQ ID | |
|---|---|---|---|---|---|
| Target | Duplex ID | ID | Antisense sequence | No. | Notes |
| CEBPA | XD-03287 | | | | Positive control |
| CEBPA | XD-03302 | X09317 | GACCAGUGACAAUGACCG | 318 | |
| | | | CUU | | |
| CEBPA | XD-03317 | X09347 | AGGAGGAUGAAUCCUUUC | 333 | |
| | | | AUU | | |
| CEBPA | XD-03318 | X09349 | GGAGGAUGAAUCCUUUCA | 334 | |
| | | | GUU | | |
| CEBPA | XD-03330 | X09373 | CUUUCAGCUGGCGCUGGC | 346 | |
| | | | CUU | | |
| Fluc | XD-03292 | X09209 | UcGAAGuAcUCAGcGUAAgs | 352 | Fluc MiNA |
| | | | usu | | modified |
| AHA1 | XD-00033 | X00123 | ACuAAUCUCcACUUcAUCC | 353 | EEL, transfection |
| | | | dTsdT | | control |
| CEBPA | XD-03923 | X09199 | UGACCAGUGACAAUGACC | 257 | XD-03287_IA |
| | | | GUU | | |
| CEBPA | XD-03924 | X09317 | GACCAGUGACAAUGACCG | 318 | XD-03302_IA |
| | | | CUU | | |
| CEBPA | XD-03925 | X09347 | AGGAGGAUGAAUCCUUUC | 333 | XD-03317_IA |
| | | | AUU | | |
| CEBPA | XD-03926 | X09349 | GGAGGAUGAAUCCUUUCA | 334 | XD-03318_IA |
| | | | GUU | | |
| CEBPA | XD-03927 | X09373 | CUUUCAGCUGGCGCUGGC | 346 | XD-03330_IA |
| | | | CUU | | |
| CEBPA | XD-03928 | X11282 | UGACCAGUGACAAUGACC | 373 | XD- |
| | | | Guu | | 03287_IA_MiNA |
| CEBPA | XD-03929 | X11283 | GACCAGUGACAAUGACCG | 374 | XD- |
| | | | Cuu | | 03302_IA_MiNA |
| CEBPA | XD-03930 | X11284 | AGGAGGAUGAAUCCUUUC | 375 | XD- |
| | | | Auu | | 03317_IA_MiNA |
| CEBPA | XD-03931 | X11285 | GGAGGAUGAAUCCUUUCA | 376 | XD- |
| | | | Guu | | 03318_IA_MiNA |
| CEBPA | XD-03932 | X11286 | CUUUCAGCUGGCGCUGGC | 377 | XD- |
| | | | Cuu | | 03330_IA_MINA |
| CEBPA | XD-03933 | X11282 | UGACCAGUGACAAUGACC | 373 | XD- |
| | | | Guu | | 03287_IA_AXO1 |
| CEBPA | XD-03934 | X11283 | GACCAGUGACAAUGACCG | 374 | XD- |
| | | | Cuu | | 03302_IA_AXO1 |
| CEBPA | XD-03935 | X11284 | AGGAGGAUGAAUCCUUUC | 375 | XD- |
| | | | Auu | | 03317_IA_AXO1 |
| CEBPA | XD-03936 | X11285 | GGAGGAUGAAUCCUUUCA | 376 | XD- |
| | | | Guu | | 03318_IA_AXO1 |
| CEBPA | XD-03937 | X11286 | CUUUCAGCUGGCGCUGGC | 377 | XD- |
| | | | Cuu | | 03330_IA_AXO1 |
| CEBPA | XD-03938 | X11287 | UGACcAGUGAcAAUGACC | 378 | XD- |
| | | | Guu | | 03287_IA_AXO2 |
| CEBPA | XD-03939 | X11288 | GACcAGUGAcAAUGACCG | 379 | XD- |
| | | | Cuu | | 03302_IA_AXO2 |
| CEBPA | XD-03940 | X11289 | AGGAGGAUGAAUCCUUUc | 380 | XD- |
| | | | Auu | | 03317_IA_AXO2 |
| CEBPA | XD-03941 | X11290 | GGAGGAUGAAUCCUUUcA | 381 | XD- |
| | | | Guu | | 03318_IA_AXO2 |
| CEBPA | XD-03942 | X11291 | CUUUcAGCUGGCGCUGGC | 382 | XD- |
| | | | Cuu | | 03330_IA_AXO2 |

TABLE 20
CEBPA mRNA levels in HepG2 cells

| | Relative | | Relative | |
|---|---|---|---|---|
| | mRNA | | mRNA | |
| | CEBPA | | CEBPA | |
| Name | 5 nM | SD | 10 nM | SD |
| XD-03287 | 1.00 | 0.08 | 0.71 | 0.09 |
| XD-03923 | 0.99 | 0.11 | 0.73 | 0.04 |
| XD-03928 | 0.94 | 0.04 | 0.59 | 0.10 |
| XD-03933 | 1.03 | 0.05 | 0.58 | 0.15 |
| XD-03938 | 0.94 | 0.08 | 0.83 | 0.34 |
| XD-03302 | 1.68 | 0.13 | 1.50 | 0.20 |
| XD-03924 | 1.75 | 0.10 | 1.37 | 0.10 |
| XD-03929 | 1.57 | 0.31 | 1.27 | 0.15 |
| XD-03934 | 1.91 | 0.72 | 1.31 | 0.12 |
| XD-03939 | 1.04 | 0.21 | 0.76 | 0.02 |
| XD-03317 | 1.12 | 0.02 | 0.84 | 0.04 |
| XD-03925 | 1.10 | 0.04 | 0.83 | 0.04 |
| XD-03930 | 1.10 | 0.14 | 0.80 | 0.08 |
| XD-03935 | 1.13 | 0.08 | 0.83 | 0.10 |
| XD-03940 | 1.17 | 0.05 | 0.69 | 0.04 |
| XD-03318 | 1.45 | 0.26 | 0.86 | 0.05 |
| XD-03926 | 1.05 | 0.06 | 0.69 | 0.15 |
| XD-03931 | 0.70 | 0.07 | 0.45 | 0.04 |
| XD-03936 | 0.80 | 0.17 | 0.46 | 0.05 |
| XD-03941 | 0.69 | 0.06 | 0.42 | 0.03 |
| XD-03330 | 1.44 | 0.07 | 1.40 | 0.06 |
| XD-03927 | 1.48 | 0.19 | 1.44 | 0.05 |
| XD-03932 | 1.21 | 0.22 | 1.31 | 0.09 |
| XD-03937 | 1.43 | 0.05 | 1.31 | 0.07 |
| XD-03942 | 1.18 | 0.10 | 1.09 | 0.06 |
| F-luc | 1.07 | 0.25 | 0.92 | 0.10 |
| Aha-1 | 0.71 | 0.10 | 0.53 | 0.03 |

TABLE 21
p21 mRNA levels in HepG2 cells

| | Res. mRNA | | Res. mRNA | |
|---|---|---|---|---|
| Name | p21 5 nM | SD | p21 10 nM | SD |
| XD-03287 | 2.24 | 0.12 | 3.06 | 0.26 |
| XD-03923 | 2.32 | 0.40 | 3.41 | 0.35 |
| XD-03928 | 2.93 | 0.37 | 3.83 | 0.70 |
| XD-03933 | 2.83 | 0.34 | 3.80 | 1.01 |
| XD-03938 | 1.35 | 0.20 | 1.57 | 0.32 |
| XD-03302 | 1.57 | 0.19 | 2.25 | 0.22 |
| XD-03924 | 1.66 | 0.23 | 2.12 | 0.30 |
| XD-03929 | 1.21 | 0.14 | 1.57 | 0.25 |
| XD-03934 | 1.29 | 0.22 | 1.66 | 0.26 |
| XD-03939 | 0.82 | 0.16 | 1.29 | 0.36 |
| XD-03317 | 0.88 | 0.07 | 0.93 | 0.10 |
| XD-03925 | 0.66 | 0.05 | 0.68 | 0.07 |
| XD-03930 | 0.66 | 0.06 | 0.70 | 0.05 |
| XD-03935 | 0.70 | 0.07 | 0.70 | 0.08 |
| XD-03940 | 0.68 | 0.06 | 0.68 | 0.08 |
| XD-03318 | 1.19 | 0.18 | 1.70 | 0.27 |
| XD-03926 | 1.02 | 0.13 | 1.21 | 0.24 |
| XD-03931 | 1.30 | 0.15 | 1.71 | 0.14 |
| XD-03936 | 1.44 | 0.10 | 1.71 | 0.17 |
| XD-03941 | 1.29 | 0.14 | 1.70 | 0.14 |
| XD-03330 | 2.08 | 0.30 | 1.96 | 0.18 |
| XD-03927 | 2.38 | 0.45 | 2.34 | 0.40 |
| XD-03932 | 1.92 | 0.46 | 2.17 | 0.29 |
| XD-03937 | 2.23 | 0.42 | 2.44 | 0.43 |
| XD-03942 | 1.62 | 0.12 | 1.77 | 0.27 |
| F-luc | 1.07 | 0.38 | 1.12 | 0.73 |
| Aha-1 | 0.83 | 0.05 | 0.98 | 0.05 |

TABLE 22
Albumin mRNA levels in HepG2 cells

| | Res. mRNA | | Res. mRNA | |
|---|---|---|---|---|
| | Albumin | | Albumin | |
| Name | 5 nM | SD | 10 nM | SD |
| XD-03287 | 0.84 | 0.12 | 0.88 | 0.14 |
| XD-03923 | 0.95 | 0.23 | 0.99 | 0.20 |
| XD-03928 | 0.98 | 0.09 | 0.98 | 0.10 |
| XD-03933 | 0.99 | 0.06 | 0.96 | 0.06 |
| XD-03938 | 1.40 | 0.38 | 0.91 | 0.23 |
| XD-03302 | 1.92 | 0.12 | 2.50 | 0.07 |
| XD-03924 | 1.99 | 0.20 | 2.42 | 0.14 |
| XD-03929 | 1.70 | 0.61 | 1.68 | 0.15 |
| XD-03934 | 2.34 | 0.95 | 2.25 | 0.36 |
| XD-03939 | 1.96 | 0.77 | 1.82 | 0.18 |
| XD-03317 | 2.53 | 0.95 | 2.18 | 0.19 |
| XD-03925 | 1.54 | 0.70 | 1.82 | 0.49 |
| XD-03930 | 1.28 | 0.55 | 1.47 | 0.33 |
| XD-03935 | 1.63 | 0.27 | 1.71 | 0.17 |
| XD-03940 | 1.73 | 0.56 | 1.50 | 0.29 |
| XD-03318 | 2.33 | 0.42 | 2.79 | 0.36 |
| XD-03926 | 2.25 | 1.29 | 1.27 | 0.23 |
| XD-03931 | 1.49 | 0.44 | 1.42 | 0.25 |
| XD-03936 | 1.84 | 0.56 | 1.53 | 0.31 |
| XD-03941 | 4.69 | 2.02 | 1.81 | 0.24 |
| XD-03330 | 1.44 | 0.07 | 1.77 | 0.20 |
| XD-03927 | 1.48 | 0.19 | 1.77 | 0.12 |
| XD-03932 | 1.21 | 0.22 | 1.61 | 0.05 |
| XD-03937 | 1.43 | 0.05 | 1.67 | 0.17 |
| XD-03942 | 1.18 | 0.10 | 1.27 | 0.42 |
| F-luc | 1.07 | 0.25 | 0.83 | 0.30 |
| Aha-1 | 1.37 | 0.51 | 1.35 | 0.10 |

TABLE 23
AFP mRNA levels in HepG2 cells

| | Res. mRNA | | Res. mRNA | |
|---|---|---|---|---|
| Name | AFP 5 nM | SD | AFP 10 nM | SD |
| XD-03287 | 0.85 | 0.18 | 0.94 | 0.10 |
| XD-03923 | 0.80 | 0.02 | 0.89 | 0.17 |
| XD-03928 | 0.89 | 0.11 | 0.78 | 0.12 |
| XD-03933 | 0.84 | 0.13 | 0.72 | 0.10 |
| XD-03938 | 0.80 | 0.07 | 0.83 | 0.33 |
| XD-03302 | 1.45 | 0.14 | 1.74 | 0.07 |
| XD-03924 | 1.45 | 0.08 | 1.75 | 0.17 |
| XD-03929 | 1.12 | 0.09 | 1.22 | 0.16 |
| XD-03934 | 1.30 | 0.06 | 1.58 | 0.24 |
| XD-03939 | 1.13 | 0.22 | 1.69 | 0.46 |
| XD-03317 | 1.40 | 0.28 | 1.49 | 0.38 |
| XD-03925 | 1.16 | 0.50 | 1.12 | 0.37 |
| XD-03930 | 1.00 | 0.35 | 1.06 | 0.26 |
| XD-03935 | 1.18 | 0.37 | 1.07 | 0.16 |
| XD-03940 | 1.06 | 0.33 | 0.97 | 0.11 |
| XD-03318 | 2.05 | 0.34 | 2.63 | 0.31 |
| XD-03926 | 1.19 | 0.24 | 1.11 | 0.22 |
| XD-03931 | 1.24 | 0.36 | 1.11 | 0.12 |
| XD-03936 | 1.07 | 0.18 | 1.06 | 0.22 |
| XD-03941 | 1.28 | 0.20 | 1.28 | 0.13 |
| XD-03330 | 1.16 | 0.09 | 1.06 | 0.11 |
| XD-03927 | 1.18 | 0.17 | 1.12 | 0.15 |
| XD-03932 | 1.05 | 0.12 | 1.05 | 0.07 |
| XD-03937 | 1.13 | 0.09 | 1.14 | 0.07 |
| XD-03942 | 0.92 | 0.09 | 0.81 | 0.05 |
| F-luc | 0.96 | 0.03 | 0.91 | 0.36 |
| Aha-1 | 0.90 | 0.29 | 1.04 | 0.08 |

TABLE 24
GAPDH mRNA levels in HepG2 cells

| | gapdh | | gapdh | |
|---|---|---|---|---|
| Name | 5 nM | SD | 10 nM | SD |
| XD-03287 | 0.55 | 0.07 | 0.47 | 0.07 |
| XD-03923 | 0.69 | 0.15 | 0.45 | 0.09 |
| XD-03928 | 0.56 | 0.06 | 0.48 | 0.12 |
| XD-03933 | 0.60 | 0.10 | 0.50 | 0.24 |
| XD-03938 | 1.02 | 0.11 | 0.86 | 0.22 |
| XD-03302 | 0.67 | 0.07 | 0.40 | 0.08 |
| XD-03924 | 0.62 | 0.08 | 0.43 | 0.07 |
| XD-03929 | 1.05 | 0.10 | 0.67 | 0.15 |
| XD-03934 | 0.85 | 0.13 | 0.56 | 0.09 |
| XD-03939 | 1.36 | 0.29 | 0.83 | 0.14 |
| XD-03317 | 0.61 | 0.04 | 0.42 | 0.05 |
| XD-03925 | 0.57 | 0.05 | 0.42 | 0.07 |
| XD-03930 | 0.68 | 0.12 | 0.41 | 0.07 |
| XD-03935 | 0.59 | 0.06 | 0.39 | 0.05 |
| XD-03940 | 0.63 | 0.04 | 0.42 | 0.05 |
| XD-03318 | 0.74 | 0.06 | 0.49 | 0.04 |
| XD-03926 | 1.05 | 0.11 | 0.89 | 0.13 |
| XD-03931 | 0.88 | 0.04 | 0.66 | 0.02 |
| XD-03936 | 0.98 | 0.10 | 0.62 | 0.04 |
| XD-03941 | 0.96 | 0.06 | 0.66 | 0.06 |
| XD-03330 | 0.49 | 0.06 | 0.36 | 0.04 |
| XD-03927 | 0.45 | 0.06 | 0.35 | 0.03 |
| XD-03932 | 0.63 | 0.16 | 0.40 | 0.05 |
| XD-03937 | 0.51 | 0.13 | 0.30 | 0.03 |
| XD-03942 | 1.00 | 0.55 | 0.82 | 0.50 |
| F-luc | 0.88 | 0.20 | 0.86 | 0.27 |
| Aha-1 | 1.33 | 0.15 | 0.85 | 0.06 |

TABLE 25
CEBPA mRNA levels in DU145 cells

| | Res. mRNA | | Res. mRNA | |
|---|---|---|---|---|
| | CEBPA | | CEBPA | |
| Name | 5 nM | SD | 10 nM | SD |
| XD-03287 | 5.40 | 1.38 | 4.93 | 0.47 |
| XD-03923 | 5.40 | 0.96 | 5.52 | 0.62 |
| XD-03928 | 6.39 | 1.64 | 7.66 | 1.53 |
| XD-03933 | 6.61 | 2.53 | 6.56 | 1.20 |
| XD-03938 | 2.23 | 0.56 | 2.23 | 0.25 |
| XD-03302 | 6.23 | 2.11 | 6.59 | 0.55 |
| XD-03924 | 8.46 | 1.85 | 10.74 | 0.79 |
| XD-03929 | 2.29 | 0.57 | 2.42 | 0.08 |
| XD-03934 | 2.44 | 0.57 | 3.92 | 0.21 |
| XD-03939 | 0.91 | 0.07 | 1.26 | 0.14 |
| XD-03317 | 5.15 | 0.77 | 6.86 | 1.30 |
| XD-03925 | 2.75 | 0.23 | 3.96 | 0.56 |
| XD-03930 | 2.23 | 0.31 | 3.32 | 0.49 |
| XD-03935 | 2.34 | 0.30 | 3.92 | 0.58 |
| XD-03940 | 2.39 | 0.53 | 4.72 | 2.83 |
| XD-03318 | 2.26 | 0.67 | 4.12 | 0.90 |
| XD-03926 | 0.81 | 0.14 | 1.14 | 0.11 |
| XD-03931 | 1.29 | 0.17 | 2.05 | 0.14 |
| XD-03936 | 1.27 | 0.14 | 2.08 | 0.17 |
| XD-03941 | 1.19 | 0.21 | 1.98 | 0.28 |
| XD-03330 | 1.32 | 0.21 | 1.75 | 0.22 |
| XD-03927 | 1.40 | 0.38 | 1.78 | 0.30 |
| XD-03932 | 1.37 | 0.26 | 1.60 | 0.34 |
| XD-03937 | 1.22 | 0.26 | 1.50 | 0.19 |
| XD-03942 | 1.44 | 0.28 | 1.12 | 0.05 |
| F-luc | 1.18 | 0.06 | 1.13 | 0.19 |
| Aha-1 | 1.30 | 0.33 | 1.82 | 0.14 |

TABLE 26
GAPDH mRNA levels in DU145 cells

| Name | gapdh 5 nM | SD | gapdh 10 nM | SD |
|---|---|---|---|---|
| XD-03287 | 0.15 | 0.04 | 0.13 | 0.03 |
| XD-03923 | 0.16 | 0.03 | 0.12 | 0.03 |
| XD-03928 | 0.15 | 0.04 | 0.10 | 0.04 |
| XD-03933 | 0.16 | 0.05 | 0.12 | 0.04 |
| XD-03938 | 0.60 | 0.11 | 0.49 | 0.07 |
| XD-03302 | 0.26 | 0.06 | 0.17 | 0.04 |
| XD-03924 | 0.20 | 0.04 | 0.15 | 0.03 |
| XD-03929 | 0.68 | 0.13 | 0.56 | 0.06 |
| XD-03934 | 0.58 | 0.10 | 0.39 | 0.05 |
| XD-03939 | 1.34 | 0.10 | 1.03 | 0.06 |
| XD-03317 | 0.20 | 0.04 | 0.17 | 0.05 |
| XD-03925 | 0.23 | 0.02 | 0.19 | 0.07 |
| XD-03930 | 0.36 | 0.07 | 0.26 | 0.05 |
| XD-03935 | 0.32 | 0.09 | 0.21 | 0.06 |
| XD-03940 | 0.38 | 0.10 | 0.24 | 0.04 |
| XD-03318 | 0.32 | 0.10 | 0.17 | 0.05 |
| XD-03926 | 1.17 | 0.13 | 0.87 | 0.04 |
| XD-03931 | 0.76 | 0.08 | 0.51 | 0.02 |
| XD-03936 | 0.84 | 0.06 | 0.55 | 0.05 |
| XD-03941 | 0.92 | 0.14 | 0.63 | 0.02 |
| XD-03330 | 0.70 | 0.21 | 0.55 | 0.12 |
| XD-03927 | 0.67 | 0.28 | 0.46 | 0.14 |
| XD-03932 | 0.72 | 0.23 | 0.65 | 0.05 |
| XD-03937 | 0.80 | 0.24 | 0.62 | 0.07 |
| XD-03942 | 0.72 | 0.14 | 0.79 | 0.08 |
| F-luc | 0.92 | 0.18 | 0.80 | 0.11 |
| Aha-1 | 0.77 | 0.10 | 0.69 | 0.09 |

[0539] In addition, transfection optimization studies were carried out with single transfection and double transfection. HepG2 cells were seeded in 24 well format (1.0×10⁵ cells/well). Single transfection was carried out using various amount (5 nM, 10 nM, 15 nM and 20 nM) of CEBPA-saRNA. AW1 and AW1+1 were tested, wherein the target of the two CEBPA-saRNAs are 1 nucleotide apart. AW1 refers AW01-5000000 and AW1+1 refers to AW01-51000 (aka AW1-51). Cells were harvested at 24 hr, 48 hr and 72 hr for qPCR analysis. Alternatively, double transfection method was employed. Reverse and forward transfections (double transfection) were carried out using various amount of CEBPA-saRNA (5 nM, 10 nM, 15 nM and 20 nM of AW1+1-CEBPA-saRNA). Cells were harvested following second transfection at 24 hr, 48 hr and 72 hr for qPCT analysis. With either the single transfection method or the double transfection method, optimized results were achieved with AW1+1.

[0540] CEBP-Luciferase reporter assay was carried out in HegG2 (P8) cells. The CEBP responsive element (ATTGCGCAAT (SEQ ID NO: 385)) was constructed with the luciferase reporter gene under the control of mCMV promoter. This was a dual reporter cassette and therefore had Renilla luciferase as the internal control for normalizing transfection efficiency and monitoring cell viability. This dual-CEBP(luc) reporter assay would then rapidly monitor CEBPA transcriptional activity in cells in response to AW50 v.s. AW51.

[0541] Seeding density was 1.5×10⁵ cells/well of 96 well format. 5% FCS (NO PSG) in 100 uL RPMI was used for primary seeding for reverse transfection. FCS refers to fetal calf serum used to supplement base media during cell culture. PSG refers Penicillin, Streptomycin and L-Glutamine. Penicillin and Streptomycin combination prevents growth of gram positive and gram negative bacteria. Lipofectamin 2000:saRNA:Luciferase construct complex was in 50 uL RPMI. Total volume/well was 150 uL. Scramble, AW-50 (aka CEBPA-AW1-500000) or AW51 (aka CEBPA-AW1-510000)) concentration was 10 ng/well. CEBPA-response-element-Luc-plasmid was 100 ng/well. CEBPA response element (CRE) plasmid contains tandem CRE repeats upstream of the Luciferase gene in addition to Renilla downstream of cytomegalovirus promoter to detect transfection efficiency. When CEBPA is transcribed and translated, it will bind to this reporter cassette and cause expression of Luciferase. CEBP-response element luciferase construct is commercially available from Qiagen (Catalogue CCS-001L). Full RPMI+10% FCS+PSG was used for forward transfection. Cells were harvested at 48 hour following forward transfection or 72 hour following initial seeding. 20 uL passive lysis buffer, 50 uL LARII Luc enzyme substrate, 50 uL Stop reaction for Renilla reading were used. LARII is the Luciferase Activating Reagent II as described by Promega (Catalogue E1910). The reagent contains the substrate (Luciferin) in addition to Magnesium and ATP that is required for enzymatic activity of luciferase to generate Luciferyl-AMP intermediate for the flash of light generated from the cells. Reading parameters were 2 sec pre-read delay followed by 10 sec measurement period. Results were shown in Table 27. CEBPA-Luc response was seen with both AW50 (avv RLU: 14.87) and AW51 (avv RLU: 24.20). Scramble induced CEBPA-Luc response had an avv RLU of 4.42. Therefore, AW50 (aka CEBPA-AW1-500000) and AW51 (aka CEBPA-AW1-510000) both showed up-regulation in luciferase reporter assay.

TABLE 27
CEBPA-Luciferase reporter assay

| | | | | Luc:Ren relative |
|---|---|---|---|---|
| | 48 h | 48 h | | to No-Luc + |
| | Luciferase | Renilla | Luc:Ren | scrmbl |
| 1.CRE-Luc + | 36 | 22340 | 0.00161 | 11.17 |
| AW50 | | | | |
| 1.CRE-Luc + | 9 | 3326 | 0.00271 | 18.76 |
| AW50 | | | | |
| 1.CRE-Luc + | 12 | 5667 | 0.00212 | 14.68 |
| AW50 | | | | |
| 2.CRE-Luc + | 20 | 8001 | 0.00250 | 17.33 |
| AW51 | | | | |
| 2.CRE-Luc + | 22 | 6860 | 0.00321 | 22.23 |
| AW51 | | | | |
| 2.CRE-Luc + | 35 | 7345 | 0.00477 | 33.04 |
| AW51 | | | | |
| 3.CRE-Luc + | 8 | 12451 | 0.00064 | 4.45 |
| Scrmbl | | | | |
| 3.CRE-Luc + | 16 | 24732 | 0.00065 | 4.49 |
| Scrmbl | | | | |
| 3.CRE-Luc + | 8 | 12850 | 0.00062 | 4.32 |
| Scrmbl | | | | |
| 4.Luc + AW50 | 7 | 10573 | 0.00066 | 4.59 |
| 4.Luc + AW50 | 12 | 20713 | 0.00058 | 4.02 |
| 4.Luc + AW50 | 6 | 15361 | 0.00039 | 2.71 |
| 5.Luc + AW51 | 8 | 56231 | 0.00014 | 0.99 |
| 5.Luc + AW51 | 3 | 140513 | 0.00002 | 0.15 |
| 5.Luc + AW51 | 5 | 33520 | 0.00015 | 1.03 |
| 6.Luc + Scrmbl | 2 | 107694 | 0.00002 | 0.13 |
| 6.Luc + Scrmbl | 21 | 92261 | 0.00023 | 1.58 |
| 6.Luc + Scrmbl | 13 | 69692 | 0.00019 | 1.29 |
| 7.POS-Luc | 154 | 110747 | 0.00139 | 9.64 |
| 7.POS-Luc | 83 | 37131 | 0.00224 | 15.50 |
| 7.POS-Luc | 169 | 54175 | 0.00312 | 21.63 |

[0542] Furthermore, peripheral blood mononuclear cell (PBMC) cytokine assays were conducted to measure immunocompetence. In vitro cytokine production by peripheral blood mononuclear cells (PBMCs) was measured as an indicator of immunocompetence. PBMC assays were carried out for various modifications of AW5 and AW51. Whole blood from 2 anonymous donors were obtained and pre-screened for infectious agents. Human peripheral blood mononuclear cells were isolated by centrifugation and plated in at ˜100,000 cells per well. Transfection of saRNA was carried out using DOTAP. Supernatants were harvested ˜20 hours after transfection and immediately assayed for IFN-α and TNF-α production by ELISA. Each treatment was analyzed in duplicate for all two donors. The sequences of the saRNAs were shown in Table 28 below.

TABLE 28
Sense sequence (lower case means 2′O-Me modification)

| Duplex-ID | Notes | Sense-ID | Sense Sequence | SEQ ID No. |
|---|---|---|---|---|
| XD-03287 | positive control | | | |
| XD-03318 | | X09348 | CUGAAAGGAUUCAUCCUCCUU | 296 |
| XD-03928 | XD- | X11267 | (invabasic)CgGuCaUuGuCaCuGgUCauu | 358 |
| | 03287_IA_MiNA | | | |
| XD-03929 | XD- | X11268 | (invabasic)GCgGuCaUuGuCaCuGgUCuu | 359 |
| | 03302_IA_MiNA | | | |
| XD-03933 | XD- | X11272 | (invabasic)cgGuCAUUGuCACuGGUCAuu | 363 |
| | 03287_IA_AXO1 | | | |
| XD-03934 | XD- | X11273 | (invabasic)gcGgUCAUUgUCAcUGGUCuu | 364 |
| | 03302_IA_AXO1 | | | |

Anti-sense sequence (lower case means 2′O-Me modification)

| Duplex-ID | Antisense-ID | Antisense Sequence | SEQ ID No. |
|---|---|---|---|
| XD-03287 | | | |
| XD-03318 | X09349 | GGAGGAUGAAUCCUUUCAGUU | 334 |
| XD-03928 | X11282 | UGACCAGUGACAAUGACCGuu | 373 |
| XD-03929 | X11283 | GACCAGUGACAAUGACCGCuu | 374 |
| XD-03933 | X11282 | UGACCAGUGACAAUGACCGuu | 373 |
| XD-03934 | X11283 | GACCAGUGACAAUGACCGCuu | 374 |

[0543] In PBMC assay for TNF-α response, freshly isolated PBMCs were transfected with DOTAP (ds-RNAs). Blunt end 25 mer RNA (transfected), CpG-motive single strand oligonucleotide (direct incubation), chol-conjugated siRNA (direct incubation) were used as positive controls. Incubation time was 20 hrs. ELISA for hsTNF-α was performed. Results were shown in Table 29.

Table 29-1

| | 133 nM transfection | | | | | | | |
|---|---|---|---|---|---|---|---|---|
| | medium | mock | XD-03287 | XD-03928 | XD-03933 | XD-03929 | XD-03934 | XD-03318 |
| Donor A | −0.36 | −0.69 | 0.36 | −0.93 | −1.95 | 1.66 | 0.08 | −0.89 |
| Donor B | −2.32 | −1.35 | −1.55 | −1.56 | −1.06 | −1.44 | 0.12 | −0.62 |

Standard dev

| | | | | | | | | |
|---|---|---|---|---|---|---|---|---|
| Donor A | 0.01 | 1.17 | 2.76 | 0.70 | 0.56 | 0.43 | 0.81 | 0.09 |
| Donor B | 0.62 | 0.28 | 0.40 | 0.76 | 0.43 | 0.06 | 0.03 | 1.05 |

Table 29-2

500 nM
direct incubation

| | blunt end | | CpG | chol |
|---|---|---|---|---|
| | pos. Ctrl | neg. ctrl | pos. Ctrl | pos. Ctrl |
| Donor A | 0.45 | −0.79 | 2.00 | 12.63 |
| Donor B | 2.43 | −0.58 | 11.18 | 14.36 |

Standard dev

| | | | | |
|---|---|---|---|---|
| Donor A | 0.08 | 0.98 | 2.01 | 1.86 |
| Donor B | 1.48 | 0.92 | 2.43 | 0.56 |

[0544] In PBMC assay for INF-α response, freshly isolated PBMCs were transfected with Geneporter-2 control (ds-RNAs). Blunt end 25 mer RNA (transfected), CpG-motive single strand oligonucleotide (direct incubation), chol-conjugated siRNA (direct incubation) were used as positive controls. Incubation time was 20 hrs. ELISA for hsINF-α was performed. Results were shown in Table 30.

Table 30-1

| | 133 nM transfection | | | | | | | |
|---|---|---|---|---|---|---|---|---|
| | medium | mock | XD-03287 | XD-03928 | XD-03933 | XD-03929 | XD-03934 | XD-03318 |
| Donor A | −42.20 | −50.14 | −37.32 | −42.97 | −58.13 | −59.72 | −51.80 | −47.21 |
| Donor B | −55.18 | −48.13 | −51.21 | −60.37 | −48.39 | −33.36 | −48.42 | −43.46 |

standard dev.

| | | | | | | | | |
|---|---|---|---|---|---|---|---|---|
| Donor A | 1.08 | 5.30 | 11.85 | 7.60 | 7.18 | 14.22 | 16.03 | 7.20 |
| Donor B | 11.24 | 13.74 | 13.88 | 5.60 | 1.71 | 7.22 | 2.32 | 0.04 |

Table 30-2

500 nM
direct icubation

| | blunt end | | CpG | chol |
|---|---|---|---|---|
| | pos. Ctrl | neg. ctrl | pos. Ctrl | pos. Ctrl |
| Donor A | 52.96 | −66.08 | 44.89 | 245.88 |
| Donor B | 56.20 | −47.25 | 233.03 | 87.43 |

standard dev.

| | | | | |
|---|---|---|---|---|
| Donor A | 7.75 | 0.48 | 2.49 | 5.30 |
| Donor B | 3.73 | 4.08 | 3.70 | 0.88 |

### Other Embodiments

[0545] It is to be understood that while the present disclosure has been described in conjunction with the detailed description thereof, the foregoing description is intended to illustrate and not limit the scope of the present disclosure, which is defined by the scope of the appended claims. Other aspects, advantages, and modifications are within the scope of the following claims.

The application's sequence listing, which the Patent Office published only in electronic form, follows.

SEQUENCE LISTING (385 sequences)

SEQ ID NO: 1 - RNA, 19 nt, synthetic construct
  source 1..19: mol_type = other RNA
cggtcattgtcactggtca

SEQ ID NO: 2 - RNA, 19 nt, synthetic construct
  source 1..19: mol_type = other RNA
tgaccagtgacaatgaccg

SEQ ID NO: 3 - RNA, 19 nt, synthetic construct
  source 1..19: mol_type = other RNA
agctgaaaggattcatcct

SEQ ID NO: 4 - RNA, 19 nt, synthetic construct
  source 1..19: mol_type = other RNA
aggatgaatccttccagct

SEQ ID NO: 5 - RNA, 19 nt, synthetic construct
  source 1..19: mol_type = other RNA
acatagtcccagtgattaa

SEQ ID NO: 6 - RNA, 19 nt, synthetic construct
  source 1..19: mol_type = other RNA
ttaatcactgggactatgt

SEQ ID NO: 7 - RNA, 19 nt, synthetic construct
  source 1..19: mol_type = other RNA
gaataagactttgtccaat

SEQ ID NO: 8 - RNA, 19 nt, synthetic construct
  source 1..19: mol_type = other RNA
attggacaaagtcttattc

SEQ ID NO: 9 - RNA, 19 nt, synthetic construct
  source 1..19: mol_type = other RNA
gcgcggattctctttcaaa

SEQ ID NO: 10 - RNA, 19 nt, synthetic construct
  source 1..19: mol_type = other RNA
tttgaaagagaatccgcgc

SEQ ID NO: 11 - RNA, 19 nt, synthetic construct
  source 1..19: mol_type = other RNA
ccaggaactcgtcgttgaa

SEQ ID NO: 12 - RNA, 19 nt, synthetic construct
  source 1..19: mol_type = other RNA
ttcaacgacgagttcctgg

SEQ ID NO: 13 - RNA, 19 nt, synthetic construct
  source 1..19: mol_type = other RNA
agaagttggccacttccat

SEQ ID NO: 14 - RNA, 19 nt, synthetic construct
  source 1..19: mol_type = other RNA
atggagtcggccgacttct

SEQ ID NO: 15 - RNA, 19 nt, synthetic construct
  source 1..19: mol_type = other RNA
aagaggtcggagaggaagt

SEQ ID NO: 16 - RNA, 19 nt, synthetic construct
  source 1..19: mol_type = other RNA
agttcctggccgacctgtt

SEQ ID NO: 17 - RNA, 19 nt, synthetic construct
  source 1..19: mol_type = other RNA
ttgtactcgtcgctgtgct

SEQ ID NO: 18 - RNA, 19 nt, synthetic construct
  source 1..19: mol_type = other RNA
agaacagcaacgagtaccg

SEQ ID NO: 19 - RNA, 19 nt, synthetic construct
  source 1..19: mol_type = other RNA
tactcgtcgctgtgcttgt

SEQ ID NO: 20 - RNA, 19 nt, synthetic construct
  source 1..19: mol_type = other RNA
acaagaacagcaacgagta

SEQ ID NO: 21 - DNA, 25 bp, synthetic construct
  source 1..25: mol_type = other DNA
  misc_feature 1..23: note = RNA
  misc_feature 23..25: note = DNA
agaagttggccacttccatggggga

SEQ ID NO: 22 - DNA, 27 bp, synthetic construct
  source 1..27: mol_type = other DNA
  misc_feature 1..2: note = DNA
  misc_feature 3..27: note = RNA
tcccccatggagtcggccgacttctac

SEQ ID NO: 23 - DNA, 25 bp, synthetic construct
  source 1..25: mol_type = other DNA
  misc_feature 1..23: note = RNA
  misc_feature 23..25: note = DNA
aagaggtcggagaggaagtcgtcgt

SEQ ID NO: 24 - DNA, 27 bp, synthetic construct
  source 1..27: mol_type = other DNA
  misc_feature 1..2: note = RNA
  misc_feature 3..27: note = DNA
acgacgagttcctggccgacctgttcc

SEQ ID NO: 25 - DNA, 25 bp, synthetic construct
  source 1..25: mol_type = other DNA
  misc_feature 1..23: note = RNA
  misc_feature 23..25: note = DNA
ttgtactcgtcgctgtgcttgtcca

SEQ ID NO: 26 - DNA, 27 bp, synthetic construct
  source 1..27: mol_type = other DNA
  misc_feature 1..2: note = DNA
  misc_feature 3..27: note = DNA
tggacaagaacagcaacgagtaccggg

SEQ ID NO: 27 - DNA, 25 bp, synthetic construct
  source 1..25: mol_type = other DNA
  misc_feature 1..23: note = RNA
  misc_feature 23..25: note = DNA
tactcgtcgctgtgcttgtccaccg

SEQ ID NO: 28 - DNA, 27 bp, synthetic construct
  source 1..27: mol_type = other DNA
  misc_feature 1..2: note = RNA
  misc_feature 3..27: note = DNA
cggtggacaagaacagcaacgagtacc

SEQ ID NO: 29 - RNA, 21 nt, synthetic construct
  source 1..21: mol_type = other RNA
ctgagtaatcgcttaaagatt

SEQ ID NO: 30 - RNA, 21 nt, synthetic construct
  source 1..21: mol_type = other RNA
tctttaagcgattactcagtt

SEQ ID NO: 31 - RNA, 21 nt, synthetic construct
  source 1..21: mol_type = other RNA
gaaactttagcgagtcagatt

SEQ ID NO: 32 - RNA, 21 nt, synthetic construct
  source 1..21: mol_type = other RNA
tctgactcgctaaagtttctt

SEQ ID NO: 33 - RNA, 21 nt, synthetic construct
  source 1..21: mol_type = other RNA
actactgagtgacagtagatt

SEQ ID NO: 34 - RNA, 20 nt, synthetic construct
  source 1..20: mol_type = other RNA
tctactgtcactcagtagtt

SEQ ID NO: 35 - RNA, 891 nt, Homo sapiens
  source 1..891: mol_type = mRNA
tcacgtgacccgggcgcgctgcggccgcccgcgcggacccggcgagaggcggcggcgggagcggcggtgatggacgggtccggggagcagcccagaggcggggggcccaccagctctgagcagatcatgaagacaggggcccttttgcttcagggtttcatccaggatcgagcagggcgaatggggggggaggcacccgagctggccctggacccggtgcctcaggatgcgtccaccaagaagctgagcgagtgtctcaagcgcatcggggacgaactggacagtaacatggagctgcagaggatgattgccgccgtggacacagactccccccgagaggtctttttccgagtggcagctgacatgttttctgacggcaacttcaactggggccgggttgtcgcccttttctactttgccagcaaactggtgctcaaggccctgtgcaccaaggtgccggaactgatcagaaccatcatgggctggacattggacttcctccgggagcggctgttgggctggatccaagaccagggtggttgggtgagactcctcaagcctcctcacccccaccaccgcgccctcaccaccgcccctgccccaccgtccctgccccccgccactcctctgggaccctgggccttctggagcaggtcacagtggtgccctctccccatcttcagatcatcagatgtggtctataatgcgttttccttacgtgtctgatcaatccccgattcatctaccctgctgacctcccagtgacccctgacctcactgtgaccttgacttgattagtgccttctgccctccctggagcctccactgcctctggaattgctcaagttcattgatgaccctctgaccctagctctttcctttttttttttt

SEQ ID NO: 36 - RNA, 2535 nt, Homo sapiens
  source 1..2535: mol_type = mRNA
gaggggccgaggccagccccggagaggagaaaacccgcgggcctggccgggtgcaggccacccttgccggcggatcggaatccccgcccacaccgtggtctttccagcaccgcagacacctgccggctcctcccgagcggagctcagggctgacaaagcgcggtcagagcggccgcttactggggctcgcccgctccttagagcactggcaatgatgtgcggatcctcgctgctgctgctgggaaactgttgagtggctgaatgaccccaggggaccctgggagagctctgaagccctcagccaccaagtggctgggctggcaagggttcattcattcattcaacaaatacgaatgtgcagcggtgctggggtcatgatggctcggtgggcagcgaggggccgggccggctggaggagcacagtgcggattctgtcgccactgggacactgtgaaccaggagtgagtcggagctgccgcgctgcccaggccatggactgtgaggtcaacaacggttccagcctcagggatgagtgcatcacaaacctactggtgtttggcttcctccaaagctgttctgacaacagcttccgcagagagctggacgcactgggccacgagctgccagtgctggctccccagtgggagggctacgatgagctgcagactgatggcaaccgcagcagccactcccgcttgggaagaatagaggcagattctgaaagtcaagaagacatcatccggaatattgccaggcacctcgcccaggtcggggacagcatggaccgtagcatccctccgggcctggtgaacggcctggccctgcagctcaggaacaccagccggtcggaggaggaccggaacagggacctggccactgccctggagcagctgctgcaggcctaccctagagacatggagaaggagaagaccatgctggtgctggccctgctgctggccaagaaggtggccagtcacacgccgtccttgctccgtgatgtctttcacacaacagtgaattttattaaccagaacctacgcacctacgtgaggagcttagccagaaatgggatggactgaacggacagttccagaagtgtgactggctaaagctcgatgtggtcacagctgtatagctgcttccagtgtagacggagccctggcatgtcaacagcgttcctagagaagacaggctggaagatagctgtgacttctattttaaagacaatgttaaacttataacccactttaaaatatctacattaatatacttgaatgaaaatgtccatttacacgtatttgaatggccttcatatcatccacacatgaatctgcacatctgtaaatctacacacggtgcctttatttccactgtgcaggttcccacttaaaaattaaattggaaagcaggtttcaaggaagtagaaacaaaatacaatttttttggtaaaaaaaaattactgtttattaaagtacaaccatagaggatggtcttacagcaggcagtatcctgtttgaggaaagcaagaatcagagaaggaacataccccttacaaatgaaaaattccactcaaaatagggactatctatcttaatactaaggaaccaacaatcttcctgtttaaaaaaccacatggcacagagattctgaactaaagtgctgcactcaaatgatgggaagtccggccccagtacacaggggcttgactttttcaacttcgtttcctttgttggagtcaaaaagaaccacttgtggttctaaaaggtgtgaaggtgatttaagggcccaggtcagccactgtttgtttacaaaatcaggtaactaactgcatacactttttctctttccatgacatcaagactttgctaaagacatgaagccacgggtgccagaagctactgcgatgccccgggagttagccccctggtaatagctgtaaacttccaatttctagccatacgctcagctcatccatgcctcagaagtgcatctggagagaacaggtttctaagcataaaagatgaaagagcagttggactttttaaaaattcagcaaagtggttccctctcttagggacagtcaaaaccaagtcacttaggtagtaccaaaataaataaggaaaagcttagctttagaaacagtgcaacactggtctgctgttccagtggtaagctatgtcccaggaatcagtttaaaagcacgacagtggatgctgggtccatatcacacacattgctgtgaacaggaaactcctgtgaccacaacatgaggccactggagacgcatatgagtaagggcactgacggactcatgatttcttcttaccagatgctttcctgttctttaagagtttaaaatcatcagaaaggaaaaacaaactctatattgttcagcatgcaatacataccacgctagggctggctcaattgaaagtgggcaaaagcttacaaatactaaaaagaagtgctgccgcgcagtgtggaggccactgtttggaaataaatcttcctaacactacaaaaaaaaaaaaaaaa

SEQ ID NO: 37 - RNA, 2938 nt, Homo sapiens
  source 1..2938: mol_type = mRNA
gagtgagtcatctctgttctgctttaggagtaaagtttaccctgcagttccttctgtggtgaagttttctctttctctcggagaccagattctgcctttctgctggagggaagtgttttcacaggttctcctccttttatcttttgtgttttttttcaagccctgctgaatttgctagtcaactcaacaggaagtgaggccatggagggaggcagaagagccagggtggttattgaaagtaaaagaaacttcttcctgggagcctttcccacccccttccctgctgagcacgtggagttaggcaggttaggggactcggagactgcgatggtgccaggaaagggtggagcggattatattctcctgccttttaaaaagatggacttcagcagaaatctttatgatattggggaacaactggacagtgaagatctggcctccctcaagttcctgagcctggactacattccgcaaaggaagcaagaacccatcaaggatgccttgatgttattccagagactccaggaaaagagaatgttggaggaaagcaatctgtccttcctgaaggagctgctcttccgaattaatagactggatttgctgattacctacctaaacactagaaaggaggagatggaaagggaacttcagacaccaggcagggctcaaatttctgcctacagggtcatgctctatcagatttcagaagaagtgagcagatcagaattgaggtcttttaagtttcttttgcaagaggaaatctccaaatgcaaactggatgatgacatgaacctgctggatattttcatagagatggagaagagggtcatcctgggagaaggaaagttggacatcctgaaaagagtctgtgcccaaatcaacaagagcctgctgaagataatcaacgactatgaagaattcagcaaagagagaagcagcagccttgaaggaagtcctgatgaattttcaaatggggaggagttgtgtggggtaatgacaatctcggactctccaagagaacaggatagtgaatcacagactttggacaaagtttaccaaatgaaaagcaaacctcggggatactgtctgatcatcaacaatcacaattttgcaaaagcacgggagaaagtgcccaaacttcacagcattagggacaggaatggaacacacttggatgcaggggctttgaccacgacctttgaagagcttcattttgagatcaagccccacgatgactgcacagtagagcaaatctatgagattttgaaaatctaccaactcatggaccacagtaacatggactgcttcatctgctgtatcctctcccatggagacaagggcatcatctatggcactgatggacaggaggcccccatctatgagctgacatctcagttcactggtttgaagtgcccttcccttgctggaaaacccaaagtgttttttattcaggcttgtcagggggataactaccagaaaggtatacctgttgagactgattcagaggagcaaccctatttagaaatggatttatcatcacctcaaacgagatatatcccggatgaggctgactttctgctggggatggccactgtgaataactgtgtttcctaccgaaaccctgcagagggaacctggtacatccagtcactttgccagagcctgagagagcgatgtcctcgaggcgatgatattctcaccatcctgactgaagtgaactatgaagtaagcaacaaggatgacaagaaaaacatggggaaacagatgcctcagcctactttcacactaagaaaaaaacttgtcttcccttctgattgatggtgctattttgtttgttttgttttgttttgtttttttgagacagaatctcgctctgtcgcccaggctggagtgcagtggcgtgatctcggctcaccgcaagctccgcctcccgggttcaggccattctcctgcctcagcctcccgagtagctgggactacaggggcccgccaccacacctggctaattttttaaaaatatttttagtagagacagggtttcactgtgttagccagggtggtcttgatctcctgacctcgtgatccacccacctcggcctcccaaagtgctgggattacaggcgtgagccaccgcgcctggccgatggtactatttagatataacactatgtttatttactaattttctagattttctactttattaattgttttgcacttttttataagagctaaagttaaataggatattaacaacaataacactgtctcctttctcttatgcttaaggctttgggaatgtttttagctggtggcaataaataccagacacgtacaaaatccagctatgaatatagagggcttatgattcagattgttatctatcaactataagcccactgttaatattctattaactttaattctctttcaaagctaaattccacactaccacattaaaaaaattagaaagtagccacgtatggtggctcatgtctataatcccagcactttgggaggttgaggtgggaggattgcttgaacccaagaggtcaaggctgcagtgagccatgttcacaccgctgcactcaagcttgggtgacagaacaagaccccgtctcaaaaaaaattttttttttaataaaacaaaatttgtttgaaatcttttaaaaattcaaatgatttttacaagttttaaataagctctccccaaacttgctttatgccttcttattgcttttatgatatatatatgcttggctaactatatttgctttttgctaacaatgctctggggtctttttatgcatttgcatttgctctttcatctctgcttggattattttaaatcattaggaattaagttatctttaaaatttaagtatcttttttcaaaaacattttttaatagaataaaatataatttgatcttattaaa

SEQ ID NO: 38 - RNA, 5472 nt, Homo sapiens
  source 1..5472: mol_type = mRNA
cccagacgctcatggagacagcctcggttcataaatcaggtggggccaggggctgggggcccacacgccatggagcccgactcccttctggaccaagacgactcctacgagtcgcctcaagaaaggccgggctctcggcgcagcctgcctggcagcctttccgagaagagccccagcatggagccctcggccgccacgccgttccgggtcacgggcttcctcagccgccgcctcaagggctccatcaagcgcaccaagagccagcccaagctggaccgcaaccacagcttccgccacatcctgccggggttccggagcgccgccgccgccgccgcggacaatgagaggtcccatctgatgccgaggctgaaggagtctcgctcccacgagtccctgctcagccccagcagtgcggtggaggcgctggacctcagcatggaggaagaggtggtcatcaagcccgtgcacagcagcatccttggccaggactactgcttcgaggtgacgacgtcatcaggaagcaagtgcttttcctgccggtctgcagctgagcgggataagtggatggagaacctccggcgagcggtgcatcccaacaaggacaacagccggcgtgtggagcacatcctgaagctgtgggtgatcgaggccaaggacctgccagccaagaagaagtacctgtgcgagctgtgcctggacgatgtgctctatgcccgcaccacgggcaagctcaagacggacaatgttttctggggcgagcacttcgagttccacaacttgccgcctctgcgcacggtcactgtccacctgtaccgggagaccgacaagaagaagaagaaggagcgcaacagttacctgggcctggtgagcctacctgctgcctcggtggccgggcggcagttcgtggagaagtggtacccggtggtgacgcccaaccccaagggcggcaagggccctggacccatgatccgcatcaaggcgcgctaccaaaccatcaccatcctgcccatggagatgtacaaagagttcgctgagcacatcaccaaccactacctggggctgtgtgcagccctcgagcccatcctcagtgccaagaccaaggaggagatggcatctgccctggtgcacatcctgcagagcacgggcaaggtgaaggacttcctgacagacctgatgatgtcagaggtggaccgctgcggggacaacgagcacctcatcttccgggagaacacactggccaccaaggccattgaggagtacctcaagctagtgggccagaagtacctgcaggacgccctaggtgagttcatcaaagcgctgtatgagtcagatgagaactgcgaagtggatcccagcaagtgctcggccgctgacctcccagagcaccagggcaacctcaagatgtgctgcgagctggccttctgcaagatcatcaactcctactgtgtcttcccacgggagttgaaagaggtgtttgcctcgtggaggcaggagtgcagcagtcgcggccgcccggacatcagtgagcggctcatcagcgcctccctcttcctgcgcttcctctgcccagccatcatgtcgccctcactcttcaacctgctgcaggagtaccctgatgaccgcactgcccgcaccctcaccctcatcgccaaggtcacccagaacctggccaactttgccaaatttggcagcaaggaggaatacatgtccttcatgaaccagttcctagagcatgagtggaccaacatgcagcgcttcctgctggagatctccaaccccgagaccctctccaatacagccggcttcgagggctacatcgacctgggccgcgagctctccagcctgcactcactgctctgggaggccgtcagccagctggagcagagcatagtatccaaactgggacccctgcctcggatcctgagggacgtccacacagcactgagcaccccaggtagcgggcagctcccagggaccaatgacctggcctccacaccgggctctggcagcagcagcatctcagctgggctgcagaagatggtgattgagaacgatctttccggtctgatagatttcacccggttaccgtctccaacccccgaaaacaaggacttgttttttgtcacaaggtcctccggggtccagccctcacctgcccgcagctcgagttactcggaagccaacgagcctgatcttcagatggccaacggtggcaagagcctctccatggtggacctccaggacgcccgcacgctggatggggaggcaggctccccggcgggccccgacgtcctccccacagatgggcaggccgctgcagctcagctggtggccgggtggccggcccgggcaaccccagtgaacctggcagggctggccacggtgcggcgggcaggccagacaccaaccacaccaggcacctccgagggcgcgccaggccggccccagctgttggcaccgctctccttccagaaccctgtgtaccagatggcggctggcctgccgctgtcaccccgtggccttggcgactcaggctctgagggccacagctccctgagctcacacagcaacagcgaggagttggcggctgctgccaagctgggaagtttcagcactgccgcggaggagctggctcggcggcccggtgagctggcacggcgacagatgtcactgactgaaaaaggcgggcagcccacggtgccacggcagaacagtgctggcccccagaggaggatcgaccagcctccgcccccacccccgccgccacctcctgccccccgcggccggacgccccccaacctgctgagcaccctgcagtacccaagaccctcaagcggaaccctggcgtcggcctcacctgattgggtgggccccagtacccgcctgaggcagcagtcctcttcctccaagggggacagcccagaactgaagccacgggcagtgcacaagcagggcccttcacctgtgagccccaatgccctggaccgcacagccgcttggctcttgaccatgaacgcgcagttgttagaagacgagggcctgggcccagaccccccccacagggataggctaaggagtaaggacgagctcagccaagcagaaaaggacctggcggtgctgcaggacaagctgcgaatctccaccaagaagctggaggagtatgagaccctgttcaagtgccaggaggagacgacgcagaagctggtgctggagtaccaggcacggctggaggagggcgaggagcggctgcggcggcagcaggaggacaaggacatccagatgaagggcatcatcagcaggttgatgtccgtggaggaagaactgaagaaggaccacgcagagatgcaagcggctgtggactccaaacagaagatcattgatgcccaggagaagcgcattgcctcgttggatgccgccaatgcccgcctcatgagtgccctgacccagctgaaagagagtatgcattagaaacaaaagcccgcttgctcgcttgctggaacacaggggccttttaagttgagcgtgcgcactgcatgggaaatagcggccctggaggatgttagacttgctccctctccaagacagcagcagcctgcacctgccccgtgtgtgtggccggcctcctcctcacccttcccggcccccggccaaggacccaggcgctgcatacaggggaggggcgcaccccacagctggggccggttttcctcagctctaggctgttctgtagcttatctgcccctcccccactttcaagacagatgagcaggagcttgggtctctctcggcccctgtctgttcccagcccctgcagattctgagcaaaggccctgggtaagaagggtgggagtggggcctttgccagcagagccagggcagggcgagctgcaggaatcacccctctgcccctgcagctggaatgtgccacagaggccccacctgaagggtggatgtgctggaggggtggcccagagccatactgcgtccaccctgagctcggggacaggtgacagtggctgctctgggaaggggcttttagatgtaacctacaattcagttaggctagagacagatgctggtggaggaagggctgggccaccagggatcacagaccacaggaagatgggaggtggaagcagaggccctgcccccaccccttcctgtctcactcttctgtcttgtccccacccatgcgccttcgtgcctgagaccagggtggccacacaggcagggcctggctccagtctcatcctcccattgcccagtgagccctgctcttctctccccagccccctcccaccgctgcctcgtagagtgacctcggacagagcccccctagcaatacagggaggctcccggggcctggacaggcgggctcggaggctacccgctgtggccggtgccagctgcccttgcagggtgggtgagctctcaggccgagagccttatttacctagtgcaaaaactgtaaaagtgtacagactcttcacagatttttatcttaattgcaagtctgccgattttgtaaatgttcttggtgtttgactgtaatgtaactatctcacctaatggttgtacatatcctttggtcctggtgctgccgagggctggccgggactgctgctctcccaagggttttattttatttctgaatctagagaacagtattgggcaggaggaaaaggcttggtgtctgcggggggtgtcttccctgcctgtggcatttgtgtgttggctttgcagctgctgtctgagtagtggccactggggtgccttcactgggccagtcaacggggggctcctgcccaggccacagagaacctgagttcccgggagctgggccctgcctgcagccagggctggggttgccagaggccctggagggaaggacagtccctgctggggaagaacagccccggggccccctggtcaccgagactcagcctctgctggagaaagccacgccctccctgctagcacagaggcctgactgacttttttgcttaacttccatgttctgggtgatggaaactgccaaacctcctgtcagtgaggactctttccgactgcccagaaagtgggggtggaggaccgaggctacagctccacacgccccggtcccccagagcatctgccccaggtacacctccccctgcgccccgcacgactgcgggagccagactgtccagggaaacagcctctctcttttctacacactcagccacaaagccccccagctcccacaccgcgtcccagctcccctcttttgtaagtatgtgaaaaggaaaaaatgcaaacgttggagtttgggctggagctcctccctccagctgcgacttttaactatgtaataatgtacagaggaagctgttggtgttctaagactctgtgtggctgtgcaatttctgtacatttgcaattagaaatattaaagatttatttagctattttaaaaaaaaaaaaaaaaaaaaa

SEQ ID NO: 39 - RNA, 7479 nt, Homo sapiens
  source 1..7479: mol_type = mRNA
tcctcagaggcaggaaatactttccaggcaatctgggcctggttgtggaggccccttttgcaaaacctcagtctgaatttagtagacagaagtcactaggaatgccttgacaggatcctgccttagctaaggctccctccagctgcagagggtgtttttgttagactcacacactgcgtgaaactgctcagaatagagccatgatctcaaccacgaaatgggaacttagattttggagaaactaacggggacggacttctttcctagcctgagtgttgagcagtgtcatgccttggcgtttcagctcctcgttgtctaggtggtgaaatgacagaactcattcgcttctttgattggtgattttgaaataatctttcatcaagttccatctcctttaccctcatatggaatatatctctctgtctgttgttaaactacgatgacatgtctgtagctatcagaaagagaagctgggaagaacatgtgacccactggatgggacagccttttaattctgatgatcgtaacacagcatgtcatcatggactagtagctgacagcttgcaggcaagtatggaaaaagatgcaactctaaatgtggaccgcaaagagaagtgtgtttcactacctgactgctgtcatggatcagagctgagagattttcctgggaggccaatgggtcatctttcaaaggatgtggacgaaaatgacagccatgaaggtgaagatcagtttctttctctggaagccagcacagaaacactagtgcatgtttctgatgaggataacaatgctgatttatgccttacagatgataaacaggttttaaatacccaagggcagaaaacatcaggccaacatatgatccaaggagcaggctccttagaaaaggcactgcccatcatacaaagtaaccaagtttcttctaactcctggggaatagctggtgaaactgaattagcactggtaaaagaaagtggggagagaaaagttactgactctataagtaaaagcctggagctttgcaatgaaataagcttaagtgaaataaaagatgcacccaaagtaaatgcagtggatactttgaacgtgaaagatattgcacctgagaaacaattgcttaactctgctgtaattgctcagcaacgaaggaaacctgacccccctaaagatgaaaatgaaagaagcacctgcaatgtagtacaaaatgagttcttggatactccttgcacaaacagaggactgccattattaaaaacagattttggaagctgccttctgcagcctccttcctgccccaatggaatgtcagctgaaaatggcctggagaagagtggtttttcacaacatcaaaacaaaagtccaccaaaggtcaaggcagaagatggcatgcagtgtttacaattaaaggagaccctggccacccaggaacccacagataaccaagtcagacttcgtaagagaaaggaaataagagaagatcgagatagggcgcggctggactccatggtgctgctgattatgaaactggaccagcttgatcaggacatagaaaatgccctcagcaccagctcctctccatcaggcacaccaacaaacctgcggcggcacgttcctgatctggaatcaggatctgaaagtggagcagataccatttcagtaaatcagacacgagtaaatttgtcttctgacactgagtccacggacctcccatcttccactccagtagccaattctggaaccaaacccaagactacggctattcaaggtatttcagagaaggaaaaggctgaaattgaagccaaggaagcttgtgattggctacgggcaactggtttcccccagtatgcacagctttatgaagatttcctgttccccatcgatatttccttggtcaagagagagcatgattttttggacagagatgccattgaggctctatgcaggcgtctaaatactttaaacaaatgtgcggtgatgaagctagaaattagtcctcatcggaaacgaagtgacgattcagacgaggatgagccttgtgccatcagtggcaaatggactttccaaagggacagcaagaggtggtcccggcttgaagagtttgatgtcttttctccaaaacaagacctggtccctgggtccccagacgactcccacccgaaggacggccccagccccggaggcacgctgatggacctcagcgagcgccaggaggtgtcttccgtccgcagcctcagcagcactggcagcctccccagccacgcgccccccagcgaggatgctgccaccccccggactaactccgtcatcagcgtttgctcctccagcaacttggcaggcaatgacgactctttcggcagcctgccctctcccaaggaactgtccagcttcagcttcagcatgaaaggccacgaaaaaactgccaagtccaagacgcgcagtctgctgaaacggatggagagcctgaagctcaagagctcccatcacagcaagcacaaagcgccctcaaagctggggttgatcatcagcgggcccatcttgcaagaggggatggatgaggagaagctgaagcagctcaactgcgtggagatctccgccctcaatggcaaccgcatcaacgtccccatggtacgaaagaggagcgtttccaactccacgcagaccagcagcagcagcagccagtcggagaccagcagcgcggtcagcacgcccagccctgttacgaggacccggagcctcagtgcgtgcaacaagcgggtgggcatgtacttagagggcttcgatcctttcaatcagtcaacatttaacaacgtggtggagcagaactttaagaaccgcgagagctacccagaggacacggtgttctacatccctgaagatcacaagcctggcactttccccaaagctctcaccaatggcagtttctccccctcggggaataacggctctgtgaactggaggacgggaagcttccacggccctggccacatcagcctcaggagggaaaacagtagcgacagccccaaggaactgaagagacgcaattcttccagctccatgagcagccgcctgagcatctacgacaacgtgccgggctccatcctctactccagttcaggggacctggcggatctggagaacgaggacatcttccccgagctggacgacatcctctaccacgtgaaggggatgcagcggatagtcaatcagtggtcggagaagttttctgatgagggagattcggactcagccctggactcggtctctccctgcccgtcctctccaaaacagatacacctggatgtggacaacgaccgaaccacacccagcgacctggacagcacaggcaactccctgaatgaaccggaagagccctccgagatcccggaaagaagggattctggggttggggcttccctaaccaggtccaacaggcaccgactgagatggcacagtttccagagctcacatcggccaagcctcaactctgtatcactacagattaactgccagtctgtggcccagatgaacctgctgcagaaatactcactcctaaagctaacggccctgctggagaaatacacaccttctaacaagcatggttttagctgggccgtgcccaagttcatgaagaggatcaaggttccagactacaaggaccggagtgtgtttggggtcccactgacggtcaacgtgcagcgcacaggacaaccgttgcctcagagcatccagcaggccatgcgatacctccggaaccattgtttggatcaggttgggctcttcagaaaatcgggggtcaagtcccggattcaggctctgcgccagatgaatgaaggtgccatagactgtgtcaactacgaaggacagtctgcttatgacgtggcagacatgctgaagcagtattttcgagatcttcctgagccactaatgacgaacaaactctcggaaacctttctacagatctaccaatatgtgcccaaggaccagcgcctgcaggccatcaaggctgccatcatgctgctgcctgacgagaaccgggaggttctgcagaccctgctttatttcctgagcgatgtcacagcagccgtaaaagaaaaccagatgaccccaaccaacctggccgtgtgcttagcgccttccctcttccatctcaacaccctgaagagagagaattcctctcccagggtaatgcaaagaaaacaaagtttgggcaaaccagatcagaaagatttgaatgaaaacctagctgccactcaagggctggcccatatgatcgccgagtgcaagaagcttttccaggttcccgaggaaatgagccgatgtcgtaattcctataccgaacaagagctgaagcccctcactctggaagcactcgggcacctgggtaatgatgactcagctgactaccaacacttcctccaggactgtgtggatggcctgtttaaagaagtcaaagagaagtttaaaggctgggtcagctactccacttcggagcaggctgagctgtcctataagaaggtgagcgaaggaccccctctgaggctttggaggtcagtcattgaagtccctgctgtgccagaggaaatcttaaagcgcctacttaaagaacagcacctctgggatgtagacctgttggattcaaaagtgatcgaaattctggacagccaaactgaaatttaccagtatgtccaaaacagtatggcacctcatcctgctcgagactacgttgttttaagaacctggaggactaatttacccaaaggagcctgtgcccttttactaacctctgtggatcacgatcgcgcacctgtggtgggtgtgagggttaatgtgctcttgtccaggtatttgattgaaccctgtgggccaggaaaatccaaactcacctacatgtgcagagttgacttaaggggccacatgccagaatggtacacaaaatcttttggacatttgtgtgcagctgaagttgtaaagatccgggattccttcagtaaccagaacactgaaaccaaagacaccaaatctaggtgatcactgaagcaacgcaaccgcttccaccaccatggtgtttgtttctagaacttttgccagtccttgaagaatgggttctgtgtctaatcctgaaacaaagaaaactacaagctggagtgtaggaattgactatagcaatttgatacatttttaaagctgcttcctgtttgttgagggtctgtattcatagaccttgactggaatatgtaagactgtgcaaaaaaaaaaaaaaaatttatgtgtattcttattcaaattgcttctgagaagcaaaactctttaaatacattatggaagataatgaagatacttcattctcttgtgatatcagtgtatgcgtacctgtgtcgctttatttgcagtgtgttgagggactggtgtatccactggaatagttggtactcttggatgtgttttctcaccaagatgagcaaagaaaggtttgcacagaggagtgtgaatgtgtgtttgttgctggctgaatggcaatagatgtctaaggtggattcagtgtctggcacactgagacacctccaagaaggagattgatgcatcaggttcagtttaacctggaatatctgactacccctgaatccacccagaaagggggcccaacacccttgtccatttatgggtattttttttcgaagttattaagcatattccttttccacgaacctcttctgtactttgattgtaataggttggctcttacacccattccaaatgcagtttatttttagacccgattgcaaatagtgatgtagttttaaccagtatggattagttcagggatgaactgctccctctagccttactggctctgatccacagggttttgttttgttttgttttgttttttgtttaagtcgagatataaaaactgaacacgataacacttactcttaaatcaagcatcaacactttttccctgttagaattctttgcatttttgtgtttgtaacagaaacgccttaagacactatgtttgggaatataggaaactatgtgtgtcccaaggaaatccctgtaaatttaactcacctacaaaaggctttttccccgcctttggttgttaacggcattcctgaaagccacatgtgtttattcattgggcttgttcttatcagcaaataggttttctggttttatgactttttgtcttattttatttttcctacatttctttttttttttttttcctttagaatgccctggaaatatatttaagtggtaatgaaaaatagtaatcatagtaaaacgcaacaagaagaaaaccaacccaaaccagtgaagttttttagaacctttagaagggtggtctttattcaggttttactgtaatggtaaggattgactcaagagacagtattagtaaatttattgtgtatggatcaaaagtgaataatgtatgaatgagagctgtaagaaggatttttattttgttataatttagttaccattttcagtgttatttcaaaggttctttgaagaattttggggcagggcatcagattagagttttaaaatttgagtattttggatatcagtgttcctcatgaagatatacatggatattcaattttgatggcttccagatttgtaagattgtatgttgtatataccattctattaagaaacatgtccactgtgctttcaaacatagataaagcatgataaagattattatttaagatatacttgtatttatacctcagatattcttttgggttttgtacctcaaggcttttttcttcttattgtaaatacactttacgtgaatacagtctaagtgaagaaaataaataaaaggaagaggtttataacttgctctatatctgtacagattataatcaataagtgcactattattaaatgtttaaagtaagggaaaagtctgggctgccttccttaatattgcatctcactcccacccttaaaaccacagattgcaaagcatagcattttagcatcaactacaatcaaaagagcgatttgctgaaggaaaaatcggactgcaaatcattccaaggccaaactgcaactgagccacccactcccaaacaggaaaccctggtgaaggttcaggaagcacggagattctctccaacaaaggtccagttaggaaacgacgctgagaggatgacgacaacgtgcaacagcagaaagatgcttgcaagcagagtcagggtcaccagtgaatgccacaaaagttctctttcccactgtttaatttgacaagagaagaatttgaaggatatgaacattttcaagaactctgctgaggtcacttagagcgccatcacaacttatttgtgtgactaattgcctagattgtaagctctttgagggcagggcttgtctcttacacatctttataatcccctgcagcggctttcagtattttgtacttgtaggcacctaataaatttattatttgctatactg

SEQ ID NO: 40 - RNA, 2755 nt, Homo sapiens
  source 1..2755: mol_type = mRNA
cctacccgcgcgcaggccaagttgctgaatcaatggagccctccccaacccgggcgttccccagcgaggcttccttcccatcctcctgaccaccggggcttttcgtgagctcgtctctgatctcgcgcaagagtgacacacaggtgttcaaagacgcttctggggagtgagggaagcggtttacgagtgacttggctggagcctcaggggcgggcactggcacggaacacaccctgaggccagccctggctgcccaggcggagctgcctcttctcccgcgggttggtggacccgctcagtacggagttggggaagctctttcacttcggaggattgctcaacaaccatgctgggcatctggaccctcctacctctggttcttacgtctgttgctagattatcgtccaaaagtgttaatgcccaagtgactgacatcaactccaagggattggaattgaggaagactgttactacagttgagactcagaacttggaaggcctgcatcatgatggccaattctgccataagccctgtcctccaggtgaaaggaaagctagggactgcacagtcaatggggatgaaccagactgcgtgccctgccaagaagggaaggagtacacagacaaagcccatttttcttccaaatgcagaagatgtagattgtgtgatgaaggacatggcttagaagtggaaataaactgcacccggacccagaataccaagtgcagatgtaaaccaaactttttttgtaactctactgtatgtgaacactgtgacccttgcaccaaatgtgaacatggaatcatcaaggaatgcacactcaccagcaacaccaagtgcaaagaggaaggatccagatctaacttggggtggctttgtcttcttcttttgccaattccactaattgtttgggtgaagagaaaggaagtacagaaaacatgcagaaagcacagaaaggaaaaccaaggttctcatgaatctccaactttaaatcctgaaacagtggcaataaatttatctgatgttgacttgagtaaatatatcaccactattgctggagtcatgacactaagtcaagttaaaggctttgttcgaaagaatggtgtcaatgaagccaaaatagatgagatcaagaatgacaatgtccaagacacagcagaacagaaagttcaactgcttcgtaattggcatcaacttcatggaaagaaagaagcgtatgacacattgattaaagatctcaaaaaagccaatctttgtactcttgcagagaaaattcagactatcatcctcaaggacattactagtgactcagaaaattcaaacttcagaaatgaaatccaaagcttggtctagagtgaaaaacaacaaattcagttctgagtatatgcaattagtgtttgaaaagattcttaatagctggctgtaaatactgcttggttttttactgggtacattttatcatttattagcgctgaagagccaacatatttgtagatttttaatatctcatgattctgcctccaaggatgtttaaaatctagttgggaaaacaaacttcatcaagagtaaatgcagtggcatgctaagtacccaaataggagtgtatgcagaggatgaaagattaagattatgctctggcatctaacatatgattctgtagtatgaatgtaatcagtgtatgttagtacaaatgtctatccacaggctaaccccactctatgaatcaatagaagaagctatgaccttttgctgaaatatcagttactgaacaggcaggccactttgcctctaaattacctctgataattctagagattttaccatatttctaaactttgtttataactctgagaagatcatatttatgtaaagtatatgtatttgagtgcagaatttaaataaggctctacctcaaagacctttgcacagtttattggtgtcatattatacaatatttcaattgtgaattcacatagaaaacattaaattataatgtttgactattatatatgtgtatgcattttactggctcaaaactacctacttctttctcaggcatcaaaagcattttgagcaggagagtattactagagctttgccacctctccatttttgccttggtgctcatcttaatggcctaatgcacccccaaacatggaaatatcaccaaaaaatacttaatagtccaccaaaaggcaagactgcccttagaaattctagcctggtttggagatactaactgctctcagagaaagtagctttgtgacatgtcatgaacccatgtttgcaatcaaagatgataaaatagattcttatttttcccccacccccgaaaatgttcaataatgtcccatgtaaaacctgctacaaatggcagcttatacatagcaatggtaaaatcatcatctggatttaggaattgctcttgtcatacccccaagtttctaagatttaagattctccttactactatcctacgtttaaatatctttgaaagtttgtattaaatgtgaattttaagaaataatatttatatttctgtaaatgtaaactgtgaagatagttataaactgaagcagatacctggaaccacctaaagaacttccatttatggaggatttttttgccccttgtgtttggaattataaaatataggtaaaagtacgtaattaaataatgtttttggtaaaaaaaaaaaaaaaaaaaaaaaaaaaaaaaaaaaaaaaaaaaaaaaaaaaaaaaaaaaaaaaaaaa

SEQ ID NO: 41 - RNA, 1122 nt, Homo sapiens
  source 1..1122: mol_type = mRNA
gaattgcagtccccgctctgctctgtccggtcacaggactttttgccctctgttcccgggtccctcaggcggccacccagtgggcacactcccaggcggcgctccggccccgcgctccctccctctgcctttcattcccagctgtcaacatcctggaagctttgaagctcaggaaagaagagaaatccactgagaacagtctgtaaaggtccgtagtgctatctacatccagacggtggaagggagagaaagagaaagaaggtatcctaggaatacctgcctgcttagaccctctataaaagctctgtgcatcctgccactgaggactccgaagaggtagcagtcttctgaaagacttcaactgtgaggacatgtcgttcagatttggccaacatctcatcaagccctctgtagtgtttctcaaaacagaactgtccttcgctcttgtgaataggaaacctgtggtaccaggacatgtccttgtgtgcccgctgcggccagtggagcgcttccatgacctgcgtcctgatgaagtggccgatttgtttcagacgacccagagagtcgggacagtggtggaaaaacatttccatgggacctctctcaccttttccatgcaggatggccccgaagccggacagactgtgaagcacgttcacgtccatgttcttcccaggaaggctggagactttcacaggaatgacagcatctatgaggagctccagaaacatgacaaggaggactttcctgcctcttggagatcagaggaggaaatggcagcagaagccgcagctctgcgggtctactttcagtgacacagatcctgaattccagcaaaagagctattgccaaccagtttgaagaccgccccccgcctctccccaagaggaactgaatcagcatgaaaatgcagtttcttcatctcaccatcctgtattcttcaaccagtgatcccccacctcggtcactccaactcccttaaaatacctagacctaaacggctcagacaggcagatttgaggtttccccctgtctccttattcggcagccttatgattaaacttccttctctgctgcaaaaaaaaaaaaaaaaaaaaaaaaaaaaaaaaaaaaaaaaaaaaa

SEQ ID NO: 42 - RNA, 1393 nt, Homo sapiens
  source 1..1393: mol_type = mRNA
tcagatcgccgaagcgtcggactaccgttggtttccgcaacttcctggattatcctcgccaaggactttgcaatatatttttccgccttttctggaaggatttcgctgcttcccgaaggtcttggacgagcgctctagctctgtgggaaggttttgggctctctggctcggattttgcaatttctccctggggactgccgtggagccgcatccactgtggattataattgcaacatgacgctggaagagctcgtggcgtgcgacaacgcggcgcagaagatgcagacggtgaccgccgcggtggaggagcttttggtggccgctcagcgccaggatcgcctcacagtgggggtgtacgagtcggccaagttgatgaatgtggacccagacagcgtggtcctctgcctcttggccattgacgaggaggaggaggatgacatcgccctgcaaatccacttcacgctcatccagtccttctgctgtgacaacgacatcaacatcgtgcgggtgtcgggcatgcagcgcctggcgcagctcctgggagagccggccgagacccagggcaccaccgaggcccgagacctgcattgtctcctggtcacgaaccctcacacggacgcctggaagagccacggcttggtggaggtggccagctactgcgaagaaagccggggcaacaaccagtgggtcccctacatctctcttcaggaacgctgaggcccttcccagcagcagaatctgttgagttgctgccacaaacaaaaaatacaataaatatttgaaccccctcccccccagcacaacccccccaaaacaacccaacccacgaggaccatcgggggcagagtcgttggagactgaagaggaagaggaggaggagaaggggagtgagcggccgcccccagggcggagatccaggagctggcggccgccgatccgatggagaaggggggacccaggccagcaggagacaggacccccgaagctgaggccttgggatggagcagaagccggagtggcggggcacgctgccgccttccccatcacggagggtccagactgtccactcgggggtggagtgagactgactgcaagccccaccctccttgagactggagctggcgtctgcatacgagagacttggttgaacttggttggtccttgtctgcaccctcgacaagaccacactttgggacttgggagctggggctgaagttgctctgtacccatgaactcccagtttgcgaattatagagacaatctattttgttacttgcacttgttattcgaaccactgagagcgagatgggaagcatagatatctatatttttatttctactatgagggccttgtaataaatttctaaagcctctgaaaaaaaaaaaaaaaaaa

SEQ ID NO: 43 - RNA, 3555 nt, Homo sapiens
  source 1..3555: mol_type = mRNA
ggccgccggggcccgggggacgcgctcgcgcgggggccgccccctccccttccctccaccctgggcgggggcgcgcgagaagcggtgacgtcaaggggcgcgctgtggcagcacctccccgcgcgctagttaaaaagaagaagaaaagagggaacgaaacatgagaggctgtgtgagaagctgcagccgccggcagaggagacctcagcatcatctagagcccagcgctggccctgcctccgcctgccccgccgccgccgtcgccgtttctgttcctgctactgtcccacctaaacaactcccgttacacggacaagtgaacatctgtggctgtcctctccttttcttcctcctcttccaactccttctcctcctcccacttcccagccgcagcagaaagcccccaacccaactgacactggcacaactgcaaacggtgtcatccgcacaactttatctcgctcctcgggctcccctaaggcattggacccatcgccgcgtcttttattttttgcaaagttgcatcgctgtacatatttttgtccccgccacctccctctgtctctggagtgccctacagccccgcaaactcctcctggagctgcgccctagtgcccctgctgggcagtggcgttcccccccatcctcccgcgcccagcccctgctgctctgggcagacgatgctgaagatgctctcctttaagctgctgctgctggccgtggctctgggcttctttgaaggagatgctaagtttggggaaagaaacgaagggagcggagcaaggaggagaaggtgcctgaatgggaaccccccgaagcgcctgaaaaggagagacaggaggatgatgtcccagctggagctgctgagtgggggagagatgctgtgcggtggcttctaccctcggctgtcctgctgcctgcggagtgacagcccggggctagggcgcctggagaataagatattttctgttaccaacaacacagaatgtgggaagttactggaggaaatcaaatgtgcactttgctctccacattctcaaagcctgttccactcacctgagagagaagtcttggaaagagacctagtacttcctctgctctgcaaagactattgcaaagaattcttttacacttgccgaggccatattccaggtttccttcaaacaactgcggatgagttttgcttttactatgcaagaaaagatggtgggttgtgctttccagattttccaagaaaacaagtcagaggaccagcatctaactacttggaccagatggaagaatatgacaaagtggaagagatcagcagaaagcacaaacacaactgcttctgtattcaggaggttgtgagtgggctgcggcagcccgttggtgccctgcatagtggggatggctcgcaacgtctcttcattctggaaaaagaaggttatgtgaagatacttacccctgaaggagaaattttcaaggagccttatttggacattcacaaacttgttcaaagtggaataaagggaggagatgaaagaggactgctaagcctcgcattccatcccaattacaagaaaaatggaaagttgtatgtgtcctataccaccaaccaagaacggtgggctatcgggcctcatgaccacattcttagggttgtggaatacacagtatccagaaaaaatccacaccaagttgatttgagaacagccagagtctttcttgaagttgcagaactccacagaaagcatctgggaggacaactgctctttggccctgacggctttttgtacatcattcttggtgatgggatgattacactggatgatatggaagaaatggatgggttaagtgatttcacaggctcagtgctacggctggatgtggacacagacatgtgcaacgtgccttattccataccaaggagcaacccacacttcaacagcaccaaccagccccccgaagtgtttgctcatgggctccacgatccaggcagatgtgctgtggatagacatcccactgatataaacatcaatttaacgatactgtgttcagactccaatggaaaaaacagatcatcagccagaattctacagataataaaggggaaagattatgaaagtgagccatcacttttagaattcaagccattcagtaatggtcctttggttggtggatttgtataccggggctgccagtcagaaagattgtatggaagctacgtgtttggagatcgtaatgggaatttcctaactctccagcaaagtcctgtgacaaagcagtggcaagaaaaaccactctgtctcggcactagtgggtcctgtagaggctacttttccggtcacatcttgggatttggagaagatgaactaggtgaagtttacattttatcaagcagtaaaagtatgacccagactcacaatggaaaactctacaaaattgtagatcccaaaagacctttaatgcctgaggaatgcagagccacggtacaacctgcacagacactgacttcagagtgctccaggctctgtcgaaacggctactgcacccccacgggaaagtgctgctgcagtccaggctgggagggggacttctgcagaactgcaaaatgtgagccagcatgtcgtcatggaggtgtctgtgttagaccgaacaagtgcctctgtaaaaaaggatatcttggtcctcaatgtgaacaagtggacagaaacatccgcagagtgaccagggcaggtattcttgatcagatcattgacatgacatcttacttgctggatctaacaagttacattgtatagtttctgggactgtttgaatattctattccaatgggcatttattttttatcctgtcattaaaaaaaaaagactgttatcctgctacacactcctgtgatttcattctcttttattaatttaaaaataatttccagaaatgtgcagatcctctgtgtgtatgtcagcatgtttgttcacatatgcacatacacatactcataacccctatatgcgttgttgcataacagatgattttttaaaatatatacttccttatgcaaagtaatttacacagaaattccattgtaaattgataatggattttttatgttactagaagagattatttgacttcccaggaattttctgtctgtaatcactaaagtcaactttaatagagttttgaaacagtactgtgcaatccgatggatctaattaaaaaaaaggcaatatttttatattaaagtactatactaggagagaatgtttcagaactccctgatgaatttctaagtgagcaacttgatataaaattgtaatcttcatttttgtcagtgtatccagttacagaatgctacacacttacctttttattggctgagaaatctggttatttcatcttaatctcaagattgttttcaagtgttttataattaaatcataatagcatattttaaaatcaatcttcctaaaaggtctgcttttattgtatattttatttaacaataggcactgggtttgtgttacatatttatatattttattttatttttataatatagacatcacctag

SEQ ID NO: 44 - RNA, 5182 nt, Homo sapiens
  source 1..5182: mol_type = mRNA
cgcctgtccccctcccgaggcccgggctcgcgacggcagagggctccgtcggcccaaaccgagctgggcgcccgcggtccgggtgcagcctccactccgccccccagtcaccgcctcccccggcccctcgacgtggcgcccttccctccgcttctctgtgctccccgcgcccctcttggcgtctggccccggcccccgctctttctcccgcaaccttcccttcgctccctcccgtcccccccagctcctagcctccgactccctccccccctcacgcccgccctctcgccttcgccgaaccaaagtggattaattacacgctttctgtttctctccgtgctgttctctcccgctgtgcgcctgcccgcctctcgctgtcctctctccccctcgccctctcttcggcccccccctttcacgttcactctgtctctcccactatctctgcccccctctatccttgatacaacagctgacctcatttcccgataccttttcccccccgaaaagtacaacatctggcccgccccagcccgaagacagcccgtcctccctggacaatcagacgaattctccccccccccccaaaaaaaagccatccccccgctctgccccgtcgcacattcggcccccgcgactcggccagagcggcgctggcagaggagtgtccggcaggagggccaacgcccgctgttcggtttgcgacacgcagcagggaggtgggcggcagcgtcgccggcttccagacaccaatgggaatcccaatggggaagtcgatgctggtgcttctcaccttcttggccttcgcctcgtgctgcattgctgcttaccgccccagtgagaccctgtgcggcggggagctggtggacaccctccagttcgtctgtggggaccgcggcttctacttcagcaggcccgcaagccgtgtgagccgtcgcagccgtggcatcgttgaggagtgctgtttccgcagctgtgacctggccctcctggagacgtactgtgctacccccgccaagtccgagagggacgtgtcgacccctccgaccgtgcttccggacaacttccccagataccccgtgggcaagttcttccaatatgacacctggaagcagtccacccagcgcctgcgcaggggcctgcctgccctcctgcgtgcccgccggggtcacgtgctcgccaaggagctcgaggcgttcagggaggccaaacgtcaccgtcccctgattgctctacccacccaagaccccgcccacgggggcgcccccccagagatggccagcaatcggaagtgagcaaaactgccgcaagtctgcagcccggcgccaccatcctgcagcctcctcctgaccacggacgtttccatcaggttccatcccgaaaatctctcggttccacgtccccctggggcttctcctgacccagtccccgtgccccgcctccccgaaacaggctactctcctcggccccctccatcgggctgaggaagcacagcagcatcttcaaacatgtacaaaatcgattggctttaaacacccttcacataccctccccccaaattatccccaattatccccacacataaaaaatcaaaacattaaactaacccccttcccccccccccacaacaaccctcttaaaactaattggctttttagaaacaccccacaaaagctcagaaattggctttaaaaaaaacaaccaccaaaaaaaatcaattggctaaaaaaaaaaagtattaaaaacgaattggctgagaaacaattggcaaaataaaggaatttggcactccccacccccctctttctcttctcccttggactttgagtcaaattggcctggacttgagtccctgaaccagcaaagagaaaagaaggaccccagaaatcacaggtgggcacgtcgctgctaccgccatctcccttctcacgggaattttcagggtaaactggccatccgaaaatagcaacaacccagactggctcctcactcccttttccatcactaaaaatcacagagcagtcagagggacccagtaagaccaaaggaggggaggacagagcatgaaaaccaaaatccatgcaaatgaaatgtaattggcacgaccctcacccccaaatcttacatctcaattcccatcctaaaaagcactcatactttatgcatccccgcagctacacacacacaacacacagcacacgcatgaacacagcacacacacgagcacagcacacacacaaacgcacagcacacacagcacacagatgagcacacagcacacacacaaacgcacagcacacacacgcacacacatgcacacacagcacacaaacgcacggcacacacacgcacacacatgcacacacagcacacacacaaacgcacagcacacacaaacgcacagcacacacgcacacacagcacacacacgagcacacagcacacaaacgcacagcacacgcacacacatgcacacacagcacacacactagcacacagcacacacacaaagacacagcacacacatgcacacacagcacacacacgcgaacacagcacacacgaacacagcacacacagcacacacacaaacacagcacacacatgcacacagcacacgcacacacagcacacacatgaacacagcacacagcacacacatgcacacacagcacacacgcatgcacagcacacatgaacacagcacacacacaaacacacagcacacacatgcacacacagcacacacactcatgcgcagcacatacatgaacacagctcacagcacacaaacacgcagcacacacgttgcacacgcaagcacccacctgcacacacacatgcgcacacacacgcacacccccacaaaattggatgaaaacaataagcatatctaagcaactacgatatctgtatggatcaggccaaagtcccgctaagattctccaatgttttcatggtctgagccccgctcctgttcccatctccactgcccctcggccctgtctgtgccctgcctctcagaggagggggctcagatggtgcggcctgagtgtgcggccggcggcatttgggatacacccgtagggtgggcggggtgtgtcccaggcctaattccatctttccaccatgacagagatgcccttgtgaggctggcctccttggcgcctgtccccacggcccccgcagcgtgagccacgatgctccccataccccacccattcccgatacaccttacttactgtgtgttggcccagccagagtgaggaaggagtttggccacattggagatggcggtagctgagcagacatgcccccacgagtagcctgactccctggtgtgctcctggaaggaagatcttggggacccccccaccggagcacacctagggatcatctttgcccgtctcctggggaccccccaagaaatgtggagtcctcgggggccgtgcactgatgcggggagtgtgggaagtctggcggttggaggggtgggtggggggcagtgggggctgggcggggggagttctggggtaggaagtggtcccgggagattttggatggaaaagtcaggaggattgacagcagacttgcagaattacatagagaaattaggaacccccaaatttcatgtcaattgatctattccccctctttgtttcttggggcatttttccttttttttttttttttgttttttttttacccctccttagctttatgcgctcagaaaccaaattaaaccccccccccatgtaacaggggggcagtgacaaaagcaagaacgcacgaagccagcctggagaccaccacgtcctgccccccgccatttatcgccctgattggattttgtttttcatctgtccctgttgcttgggttgagttgagggtggagcctcctggggggcactggccactgagcccccttggagaagtcagaggggagtggagaaggccactgtccggcctggcttctggggacagtggctggtccccagaagtcctgagggcggaggggggggttgggcagggtctcctcaggtgtcaggagggtgctcggaggccacaggagggggctcctggctggcctgaggctggccggaggggaaggggctagcaggtgtgtaaacagagggttccatcaggctggggcagggtggccgccttccgcacacttgaggaaccctcccctctccctcggtgacatcttgcccgcccctcagcaccctgccttgtctccaggaggtccgaagctctgtgggacctcttgggggcaaggtggggtgaggccggggagtagggaggtcaggcgggtctgagcccacagagcaggagagctgccaggtctgcccatcgaccaggttgcttgggccccggagcccacgggtctggtgatgccatagcagccaccaccgcggcgcctagggctgcggcagggactcggcctctgggaggtttacctcgcccccacttgtgcccccagctcagcccccctgcacgcagcccgactagcagtctagaggcctgaggcttctgggtcctggtgacggggctggcatgaccccgggggtcgtccatgccagtccgcctcagtcgcagagggtccctcggcaagcgccctgtgagtgggccattcggaacattggacagaagcccaaagagccaaattgtcacaattgtggaacccacattggcctgagatccaaaacgcttcgaggcaccccaaattacctgcccattcgtcaggacacccacccacccagtgttatattctgcctcgccggagtgggtgttcccgggggcacttgccgaccagccccttgcgtccccaggtttgcagctctcccctgggccactaaccatcctggcccgggctgcctgtctgacctccgtgcctagtcgtggctctccatcttgtctcctccccgtgtccccaatgtcttcagtggggggccccctcttgggtcccctcctctgccatcacctgaagacccccacgccaaacactgaatgtcacctgtgcctgccgcctcggtccaccttgcggcccgtgtttgactcaactcaactcctttaacgctaatatttccggcaaaatcccatgcttgggttttgtctttaaccttgtaacgcttgcaatcccaataaagcattaaaagtcatgaaaaaaaaaaaaaaaaaa

SEQ ID NO: 45 - RNA, 3620 nt, Homo sapiens
  source 1..3620: mol_type = mRNA
agcgccggcgaggcgcgggaggaggagaagcagtggggaggcgcagccgctcacctgcggggcagggcgcggaggagggacccgggctgcgcgctctcgggccgaggaaccaggacgcgcccggagcctcgcacgcggccaagctcggggcgtcccctcccctcggccgggcgaactcaaggggcgcagctctttgctttgacagagctggccggcggaggcgtgcagagcggcgagccggcgagccaggctgagaaactcgagccgggaacaaagaggggtcggactgagtgtgtgtgtcggctcgagctccgggcagaggcatttgggcccgaggcccccgctgtgactccccgagactccgcagtgccctccactgcggagtccccgcgcttgccggcaaaaactttattcttggcaaacttctctttctcttcccctcctcctcggcccccatcttctgctcctcctccttctctagcagattaaatgagcctcgagaagaaaaaccgaagcgaaagggaagaaaataagaagatctaaaacggacatctccagcgtgggtggctcctttttctttttctttttttcccacccttcaggaagtggacgtttcgttatcttctgatccttgcaccttcttttggggcaaacggggcccttctgcccagatcccctctcttttctcggaaaacaaactactaagtcggcatccggggtaactacagtggagagggtttccgcggagacgcgccgccggaccctcctctgcactttggggaggcgtgctccctccagaaccggcgttctccgcgcgcaaatcccggcgacgcggggtcgcggggtggccgccggggcagcctcgtctagcgcgcgccgcgcagacgcccccggagtcgccagctaccgcagccctcgccgcccagtgcccttcggcctcgggggcgggcgcctgcgtcggtctccgcgaagcgggaaagcgcggcggccgccgggattcgggcgccgcggcagctgctccggctgccggccggcggccccgcgctcgcccgccccgcttccgcccgctgtcctgctgcacgaacccttccaactctcctttcctcccccacccttgagttacccctctgtctttcctgctgttgcgcgggtgctcccacagcggagcggagattacagagccgccgggatgccccaactctccggaggaggtggcggcggcgggggggacccggaactctgcgccacggacgagatgatccccttcaaggacgagggcgatcctcagaaggaaaagatcttcgccgagatcagtcatcccgaagaggaaggcgatttagctgacatcaagtcttccttggtgaacgagtctgaaatcatcccggccagcaacggacacgaggtggccagacaagcacaaacctctcaggagccctaccacgacaaggccagagaacaccccgatgacggaaagcatccagatggaggcctctacaacaagggaccctcctactcgagttattccgggtacataatgatgccaaatatgaataacgacccatacatgtcaaatggatctctttctccacccatcccgagaacatcaaataaagtgcccgtggtgcagccatcccatgcggtccatcctctcacccccctcatcacttacagtgacgagcacttttctccaggatcacacccgtcacacatcccatcagatgtcaactccaaacaaggcatgtccagacatcctccagctcctgatatccctactttttatcccttgtctccgggtggtgttggacagatcaccccacctcttggctggcaaggtcagcctgtatatcccatcacgggtggattcaggcaaccctacccatcctcactgtcagtcgacacttccatgtccaggttttcccatcatatgattcccggtcctcctggtccccacacaactggcatccctcatccagctattgtaacacctcaggtcaaacaggaacatccccacactgacagtgacctaatgcacgtgaagcctcagcatgaacagagaaaggagcaggagccaaaaagacctcacattaagaagcctctgaatgcttttatgttatacatgaaagaaatgagagcgaatgtcgttgctgagtgtactctaaaagaaagtgcagctatcaaccagattcttggcagaaggtggcatgccctctcccgtgaagagcaggctaaatattatgaattagcacggaaagaaagacagctacatatgcagctttatccaggctggtctgcaagagacaattatggtaagaaaaagaagaggaagagagagaaactacaggaatctgcatcaggtacaggtccaagaatgacagctgcctacatctgaaacatggtggaaaacgaagctcattcccaacgtgcaaagccaaggcagcgaccccaggacctcttctggagatggaagcttgttgaaaacccagactgtctccacggcctgcccagtcgaccccaaaggaacactgacatcaattttaccctgaggtcactgctagagacgctgatccataaagacaatcactgccaacccctctttcgtctactgcaagagccaagttccaaaataaagcataaaaaggttttttaaaaggaaatgtaaaagcacatgagaatgctagcaggctgtggggcagctgagcagcttttctcccctcatatctgcgtgcacttcccagagcatcttgcatccaaacctgtaacctttcggcaaggacggtaacttggctgcatttgcctgtcatgcgcaactggagccagcaaccagcacatccatcagcaccccagtggaggagttcatggaagagttccctctttgtttctgcttcatttttctttcttttcttttctcctaaagcttttatttaacagtgcaaaaggatcgtttttttttgcttttttaaacttgaatttttttaatttacactttttagttttaattttcttgtatattttgctagctatgagcttttaaataaaattgaaagttctggaaaagtttgaaataatgacataaaaagaagccttctttttctgagacagcttgtctggtaagtggcttctctgtgaattgcctgtaacacatagtggcttctccgcccttgtaaggtgttcagtagagctaaataaatgtaatagccaaacccactctgttggtagcaattggcagccctatttcagtttattttttcttctgttttcttcttttctttttttaaacagtaaaccttaacagatgcgttcagcagactggtttgcagtgaattttcatttctttccttatcacccccttgttgtaaaaagcccagcacttgaattgttattactttaaatgttctgtatttgtatctgtttttattagccaattagtgggattttatgccagttgttaaaatgagcattgatgtacccattttttaaaaaagcaaggcacagcctttgcccaaaactgtcatcctaacgtttgtcattccagtttgagttaatgtgctgagcatttttttaaaagaagctttgtaataaaacatttttaaaaattgtcatttaaaaaaaaaaaaaaaaaa

SEQ ID NO: 46 - RNA, 5572 nt, Homo sapiens
  source 1..5572: mol_type = mRNA
cctcccctcgcccggcgcggtcccgtccgcctctcgctcgcctcccgcctcccctcggtcttccgaggcgcccgggctcccggcgcggcggcggagggggcgggcaggccggcgggcggtgatgtggcgggactctttatgcgctgcggcaggatacgcgctcggcgctgggacgcgactgcgctcagttctctcctctcggaagctgcagccatgatggaagtttgagagttgagccgctgtgaggcgaggccgggctcaggcgagggagatgagagacggcggcggccgcggcccggagcccctctcagcgcctgtgagcagccgcgggggcagcgccctcggggagccggccggcctgcggcggcggcagcggcggcgtttctcgcctcctcttcgtcttttctaaccgtgcagcctcttcctcggcttctcctgaaagggaaggtggaagccgtgggctcgggcgggagccggctgaggcgcggcggcggcggcggcacctcccgctcctggagcgggggggagaagcggcggcggcggcggccgcggcggctgcagctccagggagggggtctgagtcgcctgtcaccatttccagggctgggaacgccggagagttggtctctccccttctactgcctccaacacggcggcggcggcggcggcacatccagggacccgggccggttttaaacctcccgtccgccgccgccgcaccccccgtggcccgggctccggaggccgccggcggaggcagccgttcggaggattattcgtcttctccccattccgctgccgccgctgccaggcctctggctgctgaggagaagcaggcccagtcgctgcaaccatccagcagccgccgcagcagccattacccggctgcggtccagagccaagcggcggcagagcgaggggcatcagctaccgccaagtccagagccatttccatcctgcagaagaagccccgccaccagcagcttctgccatctctctcctcctttttcttcagccacaggctcccagacatgacagccatcatcaaagagatcgttagcagaaacaaaaggagatatcaagaggatggattcgacttagacttgacctatatttatccaaacattattgctatgggatttcctgcagaaagacttgaaggcgtatacaggaacaatattgatgatgtagtaaggtttttggattcaaagcataaaaaccattacaagatatacaatctttgtgctgaaagacattatgacaccgccaaatttaattgcagagttgcacaatatccttttgaagaccataacccaccacagctagaacttatcaaacccttttgtgaagatcttgaccaatggctaagtgaagatgacaatcatgttgcagcaattcactgtaaagctggaaagggacgaactggtgtaatgatatgtgcatatttattacatcggggcaaatttttaaaggcacaagaggccctagatttctatggggaagtaaggaccagagacaaaaagggagtaactattcccagtcagaggcgctatgtgtattattatagctacctgttaaagaatcatctggattatagaccagtggcactgttgtttcacaagatgatgtttgaaactattccaatgttcagtggcggaacttgcaatcctcagtttgtggtctgccagctaaaggtgaagatatattcctccaattcaggacccacacgacgggaagacaagttcatgtactttgagttccctcagccgttacctgtgtgtggtgatatcaaagtagagttcttccacaaacagaacaagatgctaaaaaaggacaaaatgtttcacttttgggtaaatacattcttcataccaggaccagaggaaacctcagaaaaagtagaaaatggaagtctatgtgatcaagaaatcgatagcatttgcagtatagagcgtgcagataatgacaaggaatatctagtacttactttaacaaaaaatgatcttgacaaagcaaataaagacaaagccaaccgatacttttctccaaattttaaggtgaagctgtacttcacaaaaacagtagaggagccgtcaaatccagaggctagcagttcaacttctgtaacaccagatgttagtgacaatgaacctgatcattatagatattctgacaccactgactctgatccagagaatgaaccttttgatgaagatcagcatacacaaattacaaaagtctgaatttttttttatcaagagggataaaacaccatgaaaataaacttgaataaactgaaaatggacctttttttttttaatggcaataggacattgtgtcagattaccagttataggaacaattctcttttcctgaccaatcttgttttaccctatacatccacagggttttgacacttgttgtccagttgaaaaaaggttgtgtagctgtgtcatgtatatacctttttgtgtcaaaaggacatttaaaattcaattaggattaataaagatggcactttcccgttttattccagttttataaaaagtggagacagactgatgtgtatacgtaggaattttttccttttgtgttctgtcaccaactgaagtggctaaagagctttgtgatatactggttcacatcctacccctttgcacttgtggcaacagataagtttgcagttggctaagagaggtttccgaagggttttgctacattctaatgcatgtattcgggttaggggaatggagggaatgctcagaaaggaaataattttatgctggactctggaccatataccatctccagctatttacacacacctttctttagcatgctacagttattaatctggacattcgaggaattggccgctgtcactgcttgttgtttgcgcatttttttttaaagcatattggtgctagaaaaggcagctaaaggaagtgaatctgtattggggtacaggaatgaaccttctgcaacatcttaagatccacaaatgaagggatataaaaataatgtcataggtaagaaacacagcaacaatgacttaaccatataaatgtggaggctatcaacaaagaatgggcttgaaacattataaaaattgacaatgatttattaaatatgttttctcaattgtaacgacttctccatctcctgtgtaatcaaggccagtgctaaaattcagatgctgttagtacctacatcagtcaacaacttacacttattttactagttttcaatcataatacctgctgtggatgcttcatgtgctgcctgcaagcttcttttttctcattaaatataaaatattttgtaatgctgcacagaaattttcaatttgagattctacagtaagcgttttttttctttgaagatttatgatgcacttattcaatagctgtcagccgttccacccttttgaccttacacattctattacaatgaattttgcagttttgcacattttttaaatgtcattaactgttagggaattttacttgaatactgaatacatataatgtttatattaaaaaggacatttgtgttaaaaaggaaattagagttgcagtaaactttcaatgctgcacacaaaaaaaagacatttgatttttcagtagaaattgtcctacatgtgctttattgatttgctattgaaagaatagggtttttttttttttttttttttttttttttaaatgtgcagtgttgaatcatttcttcatagtgctcccccgagttgggactagggcttcaatttcacttcttaaaaaaaatcatcatatatttgatatgcccagactgcatacgattttaagcggagtacaactactattgtaaagctaatgtgaagatattattaaaaaggtttttttttccagaaatttggtgtcttcaaattataccttcaccttgacatttgaatatccagccattttgtttcttaatggtataaaattccattttcaataacttattggtgctgaaattgttcactagctgtggtctgacctagttaatttacaaatacagattgaataggacctactagagcagcatttatagagtttgatggcaaatagattaggcagaacttcatctaaaatattcttagtaaataatgttgacacgttttccataccttgtcagtttcattcaacaatttttaaatttttaacaaagctcttaggatttacacatttatatttaaacattgatatatagagtattgattgattgctcataagttaaattggtaaagttagagacaactattctaacacctcaccattgaaatttatatgccaccttgtctttcataaaagctgaaaattgttacctaaaatgaaaatcaacttcatgttttgaagatagttataaatattgttctttgttacaatttcgggcaccgcatattaaaacgtaactttattgttccaatatgtaacatggagggccaggtcataaataatgacattataatgggcttttgcactgttattatttttcctttggaatgtgaaggtctgaatgagggttttgattttgaatgtttcaatgtttttgagaagccttgcttacattttatggtgtagtcattggaaatggaaaaatggcattatatatattatatatataaatatatattatacatactctccttactttatttcagttaccatccccatagaatttgacaagaattgctatgactgaaaggttttcgagtcctaattaaaactttatttatggcagtattcataattagcctgaaatgcattctgtaggtaatctctgagtttctggaatattttcttagactttttggatgtgcagcagcttacatgtctgaagttacttgaaggcatcacttttaagaaagcttacagttgggccctgtaccatcccaagtcctttgtagctcctcttgaacatgtttgccatacttttaaaagggtagttgaataaatagcatcaccattctttgctgtggcacaggttataaacttaagtggagtttaccggcagcatcaaatgtttcagctttaaaaaataaaagtagggtacaagtttaatgtttagttctagaaattttgtgcaatatgttcataacgatggctgtggttgccacaaagtgcctcgtttacctttaaatactgttaatgtgtcatgcatgcagatggaaggggtggaactgtgcactaaagtgggggctttaactgtagtatttggcagagttgccttctacctgccagttcaaaagttcaacctgttttcatatagaatatatatactaaaaaatttcagtctgttaaacagccttactctgattcagcctcttcagatactcttgtgctgtgcagcagtggctctgtgtgtaaatgctatgcactgaggatacacaaaaataccaatatgatgtgtacaggataatgcctcatcccaatcagatgtccatttgttattgtgtttgttaacaaccctttatctcttagtgttataaactccacttaaaactgattaaagtctcattcttgtcaaaaaaaaaaaaaaaaaaaaaaaaaaa

SEQ ID NO: 47 - RNA, 4600 nt, Homo sapiens
  source 1..4600: mol_type = mRNA
gcgcacgcgcgcgggcccgcgccgacgcagcacggcctcgagggcgcgagcccgcgccgccgccgccgccgccggtcccggaccactgtgagcccgcggcgtgaggcgtgggaggaagcgcggctgctgtcgcccagcgccgccccgtcgtcgtctgccttcgcttcacggcgccgagccgcggtccgagcagaactggggctcccttgcatcttccagttacaaattcagtgccttctgcagtttccccagagctcctcaagaataacggaagggagaatatgacagatacctagcatctagcaaaataatggcagctgcttaccttgaccccaacttgaatcacacaccaaattcgagtactaagactcacctgggtactggtatggaacgttctcctggtgcaatggagcgagtattaaaggtctttcattattttgaaagcaatagtgagccaaccacctgggccagtattatcaggcatggagatgctactgatgtcaggggcatcattcagaagatagtggacagtcacaaagtaaagcatgtggcctgctatggattccgcctcagtcacctgcggtcagaggaggttcactggcttcacgtggatatgggcgtctccagtgtgagggagaagtatgagcttgctcacccaccagaggagtggaaatatgaattgagaattcgttatttgccaaaaggatttctaaaccagtttactgaagataagccaactttgaatttcttctatcaacaggtgaagagcgattatatgttagagatagctgatcaagtggaccaggaaattgctttgaagttgggttgtctagaaatacggcgatcatactgggagatgcggggcaatgcactagaaaagaagtctaactatgaagtattagaaaaagatgttggtttaaagcgattttttcctaagagtttactggattctgtcaaggccaaaacactaagaaaactgatccaacaaacatttagacaatttgccaaccttaatagagaagaaagtattctgaaattctttgagatcctgtctccagtctacagatttgataaggaatgcttcaagtgtgctcttggttcaagctggattatttcagtggaactggcaatcggcccagaagaaggaatcagttacctaacggacaagggctgcaatcccacacatcttgctgacttcactcaagtgcaaaccattcagtattcaaacagtgaagacaaggacagaaaaggaatgctacaactaaaaatagcaggtgcacccgagcctctgacagtgacggcaccatccctaaccattgcggagaatatggctgacctaatagatgggtactgccggctggtgaatggaacctcgcagtcatttatcatcagacctcagaaagaaggtgaacgggctttgccatcaataccaaagttggccaacagcgaaaagcaaggcatgcggacacacgccgtctctgtgtcagaaacagatgattatgctgagattatagatgaagaagatacttacaccatgccctcaaccagggattatgagattcaaagagaaagaatagaacttggacgatgtattggagaaggccaatttggagatgtacatcaaggcatttatatgagtccagagaatccagctttggcggttgcaattaaaacatgtaaaaactgtacttcggacagcgtgagagagaaatttcttcaagaagccttaacaatgcgtcagtttgaccatcctcatattgtgaagctgattggagtcatcacagagaatcctgtctggataatcatggagctgtgcacacttggagagctgaggtcatttttgcaagtaaggaaatacagtttggatctagcatctttgatcctgtatgcctatcagcttagtacagctcttgcatatctagagagcaaaagatttgtacacagggacattgctgctcggaatgttctggtgtcctcaaatgattgtgtaaaattaggagactttggattatcccgatatatggaagatagtacttactacaaagcttccaaaggaaaattgcctattaaatggatggctccagagtcaatcaattttcgacgttttacctcagctagtgacgtatggatgtttggtgtgtgtatgtgggagatactgatgcatggtgtgaagccttttcaaggagtgaagaacaatgatgtaatcggtcgaattgaaaatggggaaagattaccaatgcctccaaattgtcctcctaccctctacagccttatgacgaaatgctgggcctatgaccccagcaggcggcccaggtttactgaacttaaagctcagctcagcacaatcctggaggaagagaaggctcagcaagaagagcgcatgaggatggagtccagaagacaggccacagtgtcctgggactccggagggtctgatgaagcaccgcccaagcccagcagaccgggttatcccagtccgaggtccagcgaaggattttatcccagcccacagcacatggtacaaaccaatcattaccaggtttctggctaccctggttcacatggaatcacagccatggctggcagcatctatccaggtcaggcatctcttttggaccaaacagattcatggaatcatagacctcaggagatagcaatgtggcagcccaatgtggaggactctacagtattggacctgcgagggattgggcaagtgttgccaacccatctgatggaagagcgtctaatccgacagcaacaggaaatggaagaagatcagcgctggctggaaaaagaggaaagatttctgaaacctgatgtgagactctctcgaggcagtattgacagggaggatggaagtcttcagggtccgattggaaaccaacatatatatcagcctgtgggtaaaccaggtaaagaagaaaagaattgggcggaaagaaatcctgcagctccaccaaagaaaccgcctcgccctggagctcccggtcatctgggaagccttgccagcctcagcagccctgctgacagctacaacgagggtgtcaagccatggaggcttcagccccaggaaatcagcccccctcctactgccaacctggaccggtcgaatgataaggtgtacgagaatgtgacgggcctggtgaaagctgtcatcgagatgtccagtaaaatccagccagccccaccagaggagtatgtccctatggtgaaggaagtcggcttggccctgaggacattattggccactgtggatgagaccattcccctcctaccagccagcacccaccgagagattgagatggcacagaagctattgaactctgacctgggtgagctcatcaacaagatgaaactggcccagcagtatgtcatgaccagcctccagcaagagtacaaaaagcaaatgctgactgctgctcacgccctggctgtggatgccaaaaacttactcgatgtcattgaccaagcaagactgaaaatgcttgggcagacgagaccacactgagcctcccctaggagcacgtcttgctaccctcttttgaagatgttctctagccttccaccagcagcgaggaattaaccctgtgtcctcagtcgccagcacttacagctccaacttttttgaatgaccatctggttgaaaaatctttctcatataagtttaaccacactttgatttgggttcattttttgttttgtttttttcaatcatgatattcagaaaaatccaggatccaaaatgtggcgtttttctaagaatgaaaattatatgtaagcttttaagcatcatgaagaacaatttatgttcacattaagatacgttctaaagggggatggccaaggggtgacatcttaattcctaaactaccttagctgcatagtggaagaggagagcatgaagcaaagaattccaggaaacccaagaggctgagaattcttttgtctaccatagaattattatccagactggaatttttgtttgttagaacacccttcagttgcaatatgctaatcccactttacaaagaatataaaagctatattttgaagacttgagttatttcagaaaaaactacagccctttttgtcttacctgccttttactttcgtgtggatatgtgaagcattgggtcgggaactagctgtagaacacaactaaaaactcatgtcttttttcacagaataatgtgccagttttttgtagcaatgttatttctcttggaagcagaaatgctttgtaccagagcacctccaaactgcattgaggagaagttccagaaccatcccctttttccatttttatataatttataaagaaagattaaagccatgttgactattttacagccactggagttaactaacccttccttgtatctgtcttcccaggagagaatgaagcaaaacaggaatttggttttcttttgatgtccagttacaccatccattctgttaattttgaaaaaatataccctccctttagtttgttgggggatataaattattctcaggaagaatataatgaactgtacagttactttgacctattaaaaaggtgttaccagtaaagttcttgttgtaatatccttaaaaaaaa

SEQ ID NO: 48 - RNA, 4772 nt, Homo sapiens
  source 1..4772: mol_type = mRNA
gctcagttgccgggcgggggagggcgcgtccggtttttctcaggggacgttgaaattatttttgtaacgggagtcgggagaggacggggcgtgccccgacgtgcgcgcgcgtcgtcctccccggcgctcctccacagctcgctggctcccgccgcggaaaggcgtcatgccgcccaaaaccccccgaaaaacggccgccaccgccgccgctgccgccgcggaacccccggcaccgccgccgccgccccctcctgaggaggacccagagcaggacagcggcccggaggacctgcctctcgtcaggcttgagtttgaagaaacagaagaacctgattttactgcattatgtcagaaattaaagataccagatcatgtcagagagagagcttggttaacttgggagaaagtttcatctgtggatggagtattgggaggttatattcaaaagaaaaaggaactgtggggaatctgtatctttattgcagcagttgacctagatgagatgtcgttcacttttactgagctacagaaaaacatagaaatcagtgtccataaattctttaacttactaaaagaaattgataccagtaccaaagttgataatgctatgtcaagactgttgaagaagtatgatgtattgtttgcactcttcagcaaattggaaaggacatgtgaacttatatatttgacacaacccagcagttcgatatctactgaaataaattctgcattggtgctaaaagtttcttggatcacatttttattagctaaaggggaagtattacaaatggaagatgatctggtgatttcatttcagttaatgctatgtgtccttgactattttattaaactctcacctcccatgttgctcaaagaaccatataaaacagctgttatacccattaatggttcacctcgaacacccaggcgaggtcagaacaggagtgcacggatagcaaaacaactagaaaatgatacaagaattattgaagttctctgtaaagaacatgaatgtaatatagatgaggtgaaaaatgtttatttcaaaaattttataccttttatgaattctcttggacttgtaacatctaatggacttccagaggttgaaaatctttctaaacgatacgaagaaatttatcttaaaaataaagatctagatgcaagattatttttggatcatgataaaactcttcagactgattctatagacagttttgaaacacagagaacaccacgaaaaagtaaccttgatgaagaggtgaatgtaattcctccacacactccagttaggactgttatgaacactatccaacaattaatgatgattttaaattcagcaagtgatcaaccttcagaaaatctgatttcctattttaacaactgcacagtgaatccaaaagaaagtatactgaaaagagtgaaggatataggatacatctttaaagagaaatttgctaaagctgtgggacagggttgtgtcgaaattggatcacagcgatacaaacttggagttcgcttgtattaccgagtaatggaatccatgcttaaatcagaagaagaacgattatccattcaaaattttagcaaacttctgaatgacaacatttttcatatgtctttattggcgtgcgctcttgaggttgtaatggccacatatagcagaagtacatctcagaatcttgattctggaacagatttgtctttcccatggattctgaatgtgcttaatttaaaagcctttgatttttacaaagtgatcgaaagttttatcaaagcagaaggcaacttgacaagagaaatgataaaacatttagaacgatgtgaacatcgaatcatggaatcccttgcatggctctcagattcacctttatttgatcttattaaacaatcaaaggaccgagaaggaccaactgatcaccttgaatctgcttgtcctcttaatcttcctctccagaataatcacactgcagcagatatgtatctttctcctgtaagatctccaaagaaaaaaggttcaactacgcgtgtaaattctactgcaaatgcagagacacaagcaacctcagccttccagacccagaagccattgaaatctacctctctttcactgttttataaaaaagtgtatcggctagcctatctccggctaaatacactttgtgaacgccttctgtctgagcacccagaattagaacatatcatctggacccttttccagcacaccctgcagaatgagtatgaactcatgagagacaggcatttggaccaaattatgatgtgttccatgtatggcatatgcaaagtgaagaatatagaccttaaattcaaaatcattgtaacagcatacaaggatcttcctcatgctgttcaggagacattcaaacgtgttttgatcaaagaagaggagtatgattctattatagtattctataactcggtcttcatgcagagactgaaaacaaatattttgcagtatgcttccaccaggccccctaccttgtcaccaatacctcacattcctcgaagcccttacaagtttcctagttcacccttacggattcctggagggaacatctatatttcacccctgaagagtccatataaaatttcagaaggtctgccaacaccaacaaaaatgactccaagatcaagaatcttagtatcaattggtgaatcattcgggacttctgagaagttccagaaaataaatcagatggtatgtaacagcgaccgtgtgctcaaaagaagtgctgaaggaagcaaccctcctaaaccactgaaaaaactacgctttgatattgaaggatcagatgaagcagatggaagtaaacatctcccaggagagtccaaatttcagcagaaactggcagaaatgacttctactcgaacacgaatgcaaaagcagaaaatgaatgatagcatggatacctcaaacaaggaagagaaatgaggatctcaggaccttggtggacactgtgtacacctctggattcattgtctctcacagatgtgactgtataactttcccaggttctgtttatggccacatttaatatcttcagctctttttgtggatataaaatgtgcagatgcaattgtttgggtgattcctaagccacttgaaatgttagtcattgttatttatacaagattgaaaatcttgtgtaaatcctgccatttaaaaagttgtagcagattgtttcctcttccaaagtaaaattgctgtgctttatggatagtaagaatggccctagagtgggagtcctgataacccaggcctgtctgactactttgccttcttttgtagcatataggtgatgtttgctcttgtttttattaatttatatgtatatttttttaatttaacatgaacacccttagaaaatgtgtcctatctatcttccaaatgcaatttgattgactgcccattcaccaaaattatcctgaactcttctgcaaaaatggatattattagaaattagaaaaaaattactaattttacacattagattttattttactattggaatctgatatactgtgtgcttgttttataaaattttgcttttaattaaataaaagctggaagcaaagtataaccatatgatactatcatactactgaaacagatttcatacctcagaatgtaaaagaacttactgattattttcttcatccaacttatgtttttaaatgaggattattgatagtactcttggtttttataccattcagatcactgaatttataaagtacccatctagtacttgaaaaagtaaagtgttctgccagatcttaggtatagaggaccctaacacagtatatcccaagtgcactttctaatgtttctgggtcctgaagaattaagatacaaattaattttactccataaacagactgttaattataggagccttaatttttttttcatagagatttgtctaattgcatctcaaaattattctgccctccttaatttgggaaggtttgtgttttctctggaatggtacatgtcttccatgtatcttttgaactggcaattgtctatttatcttttatttttttaagtcagtatggtctaacactggcatgttcaaagccacattatttctagtccaaaattacaagtaatcaagggtcattatgggttaggcattaatgtttctatctgattttgtgcaaaagcttcaaattaaaacagctgcattagaaaaagaggcgcttctcccctcccctacacctaaaggtgtatttaaactatcttgtgtgattaacttatttagagatgctgtaacttaaaataggggatatttaaggtagcttcagctagcttttaggaaaatcactttgtctaactcagaattatttttaaaaagaaatctggtcttgttagaaaacaaaattttattttgtgctcatttaagtttcaaacttactattttgacagttattttgataacaatgacactagaaaacttgactccatttcatcattgtttctgcatgaatatcatacaaatcagttagtttttaggtcaagggcttactatttctgggtcttttgctactaagttcacattagaattagtgccagaattttaggaacttcagagatcgtgtattgagatttcttaaataatgcttcagatattattgctttattgcttttttgtattggttaaaactgtacatttaaaattgctatgttactattttctacaattaatagtttgtctattttaaaataaattagttgttaagagtcttaa

SEQ ID NO: 49 - RNA, 4340 nt, Homo sapiens
  source 1..4340: mol_type = mRNA
attcattcattccccgtggcactggaggcggcccactctgctctgtcagcttcggagctcctccaccctggctgccgaaagccccttcccgccatctaatgatacactctgcatacgcttctgttgagaatttgtggctagacattcctgtgggaccgggaatccaaattcttgggtacaaacagaaacttactttccttggggatttttttctctctctcactcacacacactctcgcgttctttccttttttctttttcgtagcagcaggggggaaaaaagagacaaaaacaaaacaaaaaacaacaaaaagcaacaccccccccttttattttcaaaagtagctagaggaaaaaaaaataaaacaacagccaaccaagtgaatcccaacccaaccccctgaagggctgaaaattctcgccttcttcagagcggggcatggcatcgaacagcatcttcgactccttcccgacctactcgccgaccttcatccgcgacccaagcaccagccgccgcttcacacctccctccccggccttcccctgcggcggcggcggcggcaagatgggcgagaacagcggcgcgctgagcgcgcaggcggccgtggggcccggagggcgcgcccggcccgaggtgcgctcgatggtggacgtgctggcggaccacgcaggcgagctcgtgcgcaccgacagccccaacttcctctgctccgtgctgccctcgcactggcgctgcaacaagacgctgcccgtcgccttcaaggtggtggcattgggggacgtgccggatggtacggtggtgactgtgatggcaggcaatgacgagaactactccgctgagctgcgcaatgcctcggccgtcatgaagaaccaggtggccaggttcaacgaccttcgcttcgtgggccgcagtgggcgagggaagagtttcaccctgaccatcactgtgttcaccaaccccacccaagtggcgacctaccaccgagccatcaaggtgaccgtggacggaccccgggagcccagacggcaccggcagaagctggaggaccagaccaagccgttccctgaccgctttggggacctggaacggctgcgcatgcgggtgacaccgagcacacccagcccccgaggctcactcagcaccacaagccacttcagcagccagccccagaccccaatccaaggcacctcggaactgaacccattctccgacccccgccagtttgaccgctccttccccacgctgccaaccctcacggagagccgcttcccagaccccaggatgcattatcccggggccatgtcagctgccttcccctacagcgccacgccctcgggcacgagcatcagcagcctcagcgtggcgggcatgccggccaccagccgcttccaccatacctacctcccgccaccctacccgggggccccgcagaaccagagcgggcccttccaggccaacccgtccccctaccacctctactacgggacatcctctggctcctaccagttctccatggtggccggcagcagcagtgggggcgaccgctcacctacccgcatgctggcctcttgcaccagcagcgctgcctctgtcgccgccggcaacctcatgaaccccagcctgggcggccagagtgatggcgtggaggccgacggcagccacagcaactcacccacggccctgagcacgccaggccgcatggatgaggccgtgtggcggccctactgaccgccctggtggactcctcccgctggaggcggggaccctaacaaccttcaagaccagtgatgggccggctccgaggctccgggcgggaatgggacctgcgctccagggtggtctcggtcccagggtggtcccagctggtgggagcctctggctgcatctgtgcagccacatccttgtacagaggcataggttaccacccccaccccggcccgggatactgcccccggcccagatcctggccgtctcatcccatacttctgtggggaatcagcctcctgccacccccccggaaggacctcactgtctccagctatgcccagtgctgcatgggacccatgtctcctgggacagaggccatctctcttccagagagaggcagcattggcccacaggataagcctcaggccctgggaaacctcccgacccctgcaccttcgttggagcccctgcatcccctgggtccagccccctctgcatttacacagatttgagtcagaactggaaagtgtcccccacccccaccaccctcgagcggggttcccctcattgtacagatggggcaggacccagcacgctgctggcagagatggtttgagaacacatccaagccagtccccccagcccagcttcccctccgttcctaactgttggctttcccccagccgcacgggtcccaggccccagagaagatgagtctatggcatcaggttcttaaacccaggaaagcacctacagaccggctcctccatgcactttaccagctcaacgcatccactctctgttctcttggcagggcgggggaggggggataggaggtcccctttcccctaggtggtctcataattccatttgtggagagaacaggagggccagatagataggtcctagcagaaggcattgaggtgagggatcattttgggtcagacatcaatgtccctgtcccccctgggtccagccaagctgtgccccatcccccaagcctcctgggaggatccagccaaatcttgcgactcctggcacacacctgtctgtaacctgttttgtgctctgaaagcaaatagtcctgagcaaaaaaaaaaaaaaaacaaaaaaacaaaaaaaaaacaaaacagtttttaaaactgattttagaaaaagaagcttaatctaacgttttcaaacacaaggtctcttacaggtatagttccgtgattatgatagctctgtgattataagcaacatccccgccccctctcccccccgcggacccccagctgcctcctgagggtgtggggttattagggtctcaatactttctcaaggggctacactccccatcaggcagcatcccaccagcctgcaccacaggctcccctgggaggacgagggaaacgctgatgagacgctgggcatctctcctctgtggctctaggacatctgtccaggaggctgggcggaggtgggcaggatgtgagaggtggggagtactggctgtgcgtggcaggacagaagcactgtaaagggctctccagccgcagctcagctgcactgcgttccgaggtgaagtcttgcccctgaattttgcaaaatgggaaagtgggcgcttgcccaagggccaggctgcatggattctcacatcagagttctctggccctagaaaggcttagaaaaggcgtaagggaactcataaaggctagcagcatgcggtattttaactttctgcctcggcctctgtggatgcagaaatctgccctacaaaatgctcttcattggttgtctctgtgagagcactgtccccacccaacctgtcacaacggccagaaccatacaccagagacacactggcaggttaggcagtccttctggtgatcctattccattccctcctgctgcggtttctcttggcctgtcctcactggaaaaacagtctccatctcctcaaaatagttgctgactccctgcacccaaggggcctctccatgccttcttaggaagcagctatgaatccattgtccttgtagtttcttccctcctgttctctggttatagctggtcccaggtcagcgtgggaggcacctttgggttcccagtgcccagcactttgtagtctcatcccagattactaacccttcctgatcctggagaggcagggatagtaaataaattgctcttcctaccccatcccccatcccctgacaaaaagtgacggcagccgtactgagtctgtaaggcccaaagtgggtacagacagcctgggctggtaaaagtaggtccttatttacaaggctgcgttaaagttgtactaggcaaacacactgatgtaggaagcacgaggaaaggaagacgttttgatatagtgttactgtgagcctgtcagtagtgggtaccaatcttttgtgacatattgtcatgctgaggtgtgacacctgctgcactcatctgatgtaaaaccatcccagagctggcgagaggatggagctgggtggaaactgctttgcactatcgtttgcttggtgtttgtttttaacgcacaacttgcttgtacagtaaactgtcttctgtactatttaactgtaaaatggaattttgactgatttgttacaataatataactctgagatgtgtggaagga

SEQ ID NO: 50 - RNA, 8789 nt, Homo sapiens
  source 1..8789: mol_type = mRNA
atgctcagtggcttctcgacaagttggcagcaacaacacggccctggtcgtcgtcgccgctgcggtaacggagcggtttgggtggcggagcctgcgttcgcgccttcccgctctcctcgggaggcccttcctgctctcccctaggctccgcggccgcccagggggtgggagcgggtgaggggagccaggcgcccagcgagagaggccccccgccgcagggcggcccgggagctcgaggcggtccggcccgcgcgggcagcggcgcggcgctgaggaggggcggcctggccgggacgcctcggggcgggggccgaggagctctccgggccgccggggaaagctacgggcccggtgcgtccgcggaccagcagcgcgggagagcggactcccctcgccaccgcccgagcccaggttatcctgaatacatgtctaacaattttccttgcaacgttagctgttgtttttcactgtttccaaaggatcaaaattgcttcagaaattggagacatatttgatttaaaaggaaaaacttgaacaaatggacaatatgtctattacgaatacaccaacaagtaatgatgcctgtctgagcattgtgcatagtttgatgtgccatagacaaggtggagagagtgaaacatttgcaaaaagagcaattgaaagtttggtaaagaagctgaaggagaaaaaagatgaattggattctttaataacagctataactacaaatggagctcatcctagtaaatgtgttaccatacagagaacattggatgggaggcttcaggtggctggtcggaaaggatttcctcatgtgatctatgcccgtctctggaggtggcctgatcttcacaaaaatgaactaaaacatgttaaatattgtcagtatgcgtttgacttaaaatgtgatagtgtctgtgtgaatccatatcactacgaacgagttgtatcacctggaattgatctctcaggattaacactgcagagtaatgctccatcaagtatgatggtgaaggatgaatatgtgcatgactttgagggacagccatcgttgtccactgaaggacattcaattcaaaccatccagcatccaccaagtaatcgtgcatcgacagagacatacagcaccccagctctgttagccccatctgagtctaatgctaccagcactgccaactttcccaacattcctgtggcttccacaagtcagcctgccagtatactggggggcagccatagtgaaggactgttgcagatagcatcagggcctcagccaggacagcagcagaatggatttactggtcagccagctacttaccatcataacagcactaccacctggactggaagtaggactgcaccatacacacctaatttgcctcaccaccaaaacggccatcttcagcaccacccgcctatgccgccccatcccggacattactggcctgttcacaatgagcttgcattccagcctcccatttccaatcatcctgctcctgagtattggtgttccattgcttactttgaaatggatgttcaggtaggagagacatttaaggttccttcaagctgccctattgttactgttgatggatacgtggacccttctggaggagatcgcttttgtttgggtcaactctccaatgtccacaggacagaagccattgagagagcaaggttgcacataggcaaaggtgtgcagttggaatgtaaaggtgaaggtgatgtttgggtcaggtgccttagtgaccacgcggtctttgtacagagttactacttagacagagaagctgggcgtgcacctggagatgctgttcataagatctacccaagtgcatatataaaggtctttgatttgcgtcagtgtcatcgacagatgcagcagcaggcggctactgcacaagctgcagcagctgcccaggcagcagccgtggcaggaaacatccctggcccaggatcagtaggtggaatagctccagctatcagtctgtcagctgctgctggaattggtgttgatgaccttcgtcgcttatgcatactcaggatgagttttgtgaaaggctggggaccggattacccaagacagagcatcaaagaaacaccttgctggattgaaattcacttacaccgggccctccagctcctagacgaagtacttcataccatgccgattgcagacccacaacctttagactgaggtcttttaccgttggggcccttaaccttatcaggatggtggactacaaaatacaatcctgtttataatctgaagatatatttcacttttgttctgctttatcttttcataaagggttgaaaatgtgtttgctgccttgctcctagcagacagaaactggattaaaacaattttttttttcctcttcagaacttgtcaggcatggctcagagcttgaagattaggagaaacacattcttattaattcttcacctgttatgtatgaaggaatcattccagtgctagaaaatttagccctttaaaacgtcttagagccttttatctgcagaacatcgatatgtatatcattctacagaataatccagtattgctgattttaaaggcagagaagttctcaaagttaattcacctatgttattttgtgtacaagttgttattgttgaacatacttcaaaaataatgtgccatgtgggtgagttaattttaccaagagtaactttactctgtgtttaaaaagtaagttaataatgtattgtaatctttcatccaaaatattttttgcaagttatattagtgaagatggtttcaattcagattgtcttgcaacttcagttttatttttgccaaggcaaaaaactcttaatctgtgtgtatattgagaatcccttaaaattaccagacaaaaaaatttaaaattacgtttgttattcctagtggatgactgttgatgaagtatacttttcccctgttaaacagtagttgtattcttctgtatttctaggcacaaggttggttgctaagaagcctataagaggaatttcttttccttcattcatagggaaaggttttgtattttttaaaacactaaaagcagcgtcactctacctaatgtctcactgttctgcaaaggtggcaatgcttaaactaaataatgaataaactgaatattttggaaactgctaaattctatgttaaatactgtgcagaataatggaaacattacagttcataataggtagtttggatatttttgtacttgatttgatgtgactttttttggtataatgtttaaatcatgtatgttatgatattgtttaaaattcagtttttgtatcttggggcaagactgcaaacttttttatatcttttggttattctaagccctttgccatcaatgatcatatcaattggcagtgactttgtatagagaatttaagtagaaaagttgcagatgtattgactgtaccacagacacaatatgtatgctttttacctagctggtagcataaataaaactgaatctcaacatacaaagttgaattctaggtttgatttttaagattttttttttcttttgcacttttgagtccaatctcagtgatgaggtaccttctactaaatgacaggcaacagccagttctattgggcagctttgtttttttccctcacactctaccgggacttccccatggacattgtgtatcatgtgtagagttggttttttttttttttaatttttattttactatagcagaaatagacctgattatctacaagatgataaatagattgtctacaggataaatagtatgaaataaaatcaaggattatctttcagatgtgtttacttttgcctggagaacttttagctatagaaacacttgtgtgatgatagtcctccttatatcacctggaatgaacacagcttctactgccttgctcagaaggtcttttaaatagaccatcctagaaaccactgagtttgcttatttctgtgatttaaacatagatcttgatccaagctacatgacttttgtctttaaataacttatctaccacctcatttgtactcttgattacttacaaattctttcagtaaacacctaattttcttctgtaaaagtttggtgatttaagttttattggcagttttataaaaagacatcttctctagaaattgctaactttaggtccattttactgtgaatgaggaataggagtgagttttagaataacagatttttaaaaatccagatgatttgattaaaaccttaatcatacattgacataattcattgcttcttttttttgagatatggagtcttgctgtgttgcccaggcaggagtgcagtggtatgatctcagctcactgcaacctctgcctcccgggttcaactgattctcctgcctcagcctccctggtagctaggattacaggtgcccgccaccatgcctggctaacttttgtagttttagtagagacggggttttgcctgttggccaggctggtcttgaactcctgacctcaagtgatccatccaccttggcctcccaaagtgctgggattacgggcgtgagccactgtccctggcctcattgttcccttttctactttaaggaaagttttcatgtttaatcatctggggaaagtatgtgaaaaatatttgttaagaagtatctctttggagccaagccacctgtcttggtttctttctactaagagccataaagtatagaaatacttctagttgttaagtgcttatatttgtacctagatttagtcacacgcttttgagaaaacatctagtatgttatgatcagctattcctgagagcttggttgttaatctatatttctatttcttagtggtagtcatctttgatgaataagactaaagattctcacaggtttaaaattttatgtctactttaagggtaaaattatgaggttatggttctgggtgggttttctctagctaattcatatctcaaagagtctcaaaatgttgaatttcagtgcaagctgaatgagagatgagccatgtacacccaccgtaagacctcattccatgtttgtccagtgcctttcagtgcattatcaaagggaatccttcatggtgttgcctttattttccggggagtagatcgtgggatatagtctatctcatttttaatagtttaccgcccctggtatacaaagataatgacaataaatcactgccatataaccttgctttttccagaaacatggctgttttgtattgctgtaaccactaaataggttgcctataccattcctcctgtgaacagtgcagatttacaggttgcatggtctggcttaaggagagccatacttgagacatgtgagtaaactgaactcatattagctgtgctgcatttcagacttaaaatccatttttgtggggcagggtgtggtgtgtaaaggggggtgtttgtaatacaagttgaaggcaaaataaaatgtcctgtctcccagatgatatacatcttattatttttaaagtttattgctaattgtaggaaggtgagttgcaggtatctttgactatggtcatctggggaaggaaaattttacattttactattaatgctccttaagtgtctatggaggttaaagaataaaatggtaaatgtttctgtgcctggtttgatggtaactggttaatagttactcaccattttatgcagagtcacattagttcacaccctttctgagagccttttgggagaagcagttttattctctgagtggaacagagttctttttgttgataatttctagtttgctcccttcgttattgccaactttactggcattttatttaatgatagcagattgggaaaatggcaaatttaggttacggaggtaaatgagtatatgaaagcaattacctctaaagccagttaacaattattttgtaggtggggtacactcagcttaaagtaatgcatttttttttcccgtaaaggcagaatccatcttgttgcagatagctatctaaataatctcatatcctcttttgcaaagactacagagaataggctatgacaatcttgttcaagcctttccatttttttccctgataactaagtaatttctttgaacataccaagaagtatgtaaaaagtccatggccttattcatccacaaagtggcatcctaggcccagccttatccctagcagttgtcccagtgctgctaggttgcttatcttgtttatctggaatcactgtggagtgaaattttccacatcatccagaattgccttatttaagaagtaaaacgttttaatttttagcctttttttggtggagttatttaatatgtatatcagaggatatactagatggtaacatttctttctgtgcttggctatctttgtggacttcaggggcttctaaaacagacaggactgtgttgcctttactaaatggtctgagacagctatggttttgaatttttagttttttttttttaacccacttcccctcctggtctcttccctctctgataattaccattcatatgtgagtgttagtgtgcctccttttagcattttcttcttctctttctgattcttcatttctgactgcctaggcaaggaaaccagataaccaaacttactagaacgttctttaaaacacaagtacaaactctgggacaggacccaagacactttcctgtgaagtgctgaaaaagacctcattgtattggcatttgatatcagtttgatgtagcttagagtgcttcctgattcttgctgagtttcaggtagttgagatagagagaagtgagtcatattcatattttcccccttagaataatattttgaaaggtttcattgcttccacttgaatgctgctcttacaaaaactggggttacaagggttactaaattagcatcagtagccagaggcaataccgttgtctggaggacaccagcaaacaacacacaacaaagcaaaacaaaccttgggaaactaaggccatttgttttgttttggtgtcccctttgaagccctgccttctggccttactcctgtacagatatttttgacctataggtgcctttatgagaattgagggtctgacatcctgccccaaggagtagctaaagtaattgctagtgttttcagggattttaacatcagactggaatgaatgaatgaaactttttgtcctttttttttctgtttttttttttctaatgtagtaaggactaaggaaaacctttggtgaagacaatcatttctctctgttgatgtggatacttttcacaccgtttatttaaatgctttctcaataggtccagagccagtgttcttgttcaacctgaaagtaatggctctgggttgggccagacagttgcactctctagtttgccctctgccacaaatttgatgtgtgacctttgggcaagtcatttatcttctctgggccttagttgcctcatctgtaaaatgagggagttggagtagattaattattccagctctgaaattctaagtgaccttggctaccttgcagcagttttggatttcttccttatctttgttctgctgtttgagggggctttttacttatttccatgttattcaaaggagactaggcttgatattttattactgttcttttatggacaaaaggttacatagtatgcccttaagacttaattttaaccaaaggcctagcaccaccttaggggctgcaataaacacttaacgcgcgtgcgcacgcgcgcgcgcacacacacacacacacacacacacacacacaggtcagagtttaaggctttcgagtcatgacattctagcttttgaattgcgtgcacacacacacgcacgcacacactctggtcagagtttattaaggctttcgagtcatgacattatagcttttgagttggtgtgtgtgacaccaccctcctaagtggtgtgtgcttgtaattttttttttcagtgaaaatggattgaaaacctgttgttaatgcttagtgatattatgctcaaaacaaggaaattcccttgaaccgtgtcaattaaactggtttatatgactcaagaaaacaataccagtagatgattattaactttattcttggctctttttaggtccattttgattaagtgacttttggctggatcattcagagctctcttctagcctacccttggatgagtacaattaatgaaattcatattttcaaggacctgggagccttccttggggctgggttgagggtggggggttggggagtcctggtagaggccagctttgtggtagctggagaggaagggatgaaaccagctgctgttgcaaaggctgcttgtcattgatagaaggactcacgggcttggattgattaagactaaacatggagttggcaaactttcttcaagtattgagttctgttcaatgcattggacatgtgatttaagggaaaagtgtgaatgcttatagatgatgaaaacctggtgggctgcagagcccagtttagaagaagtgagttgggggttggggacagatttggtggtggtatttcccaactgtttcctcccctaaattcagaggaatgcagctatgccagaagccagagaagagccactcgtagcttctgctttggggacaactggtcagttgaaagtcccaggagttcctttgtggctttctgtatacttttgcctggttaaagtctgtggctaaaaaatagtcgaacctttcttgagaactctgtaacaaagtatgtttttgattaaaagagaaagccaactaaaaaaaaaaaaaaaaaaaa

SEQ ID NO: 51 - RNA, 2737 nt, Homo sapiens
  source 1..2737: mol_type = mRNA
gcggctccgacttggactccctgctccgctgctgccgcttcggccccgcacgcagccagccgccagccgcccgcccggcccagctcccgccgcggccccttgccgcggtccctctcctggtcccctcccggttggtccgggggtgcgcagggggcagggcgggcgcccaggggaagctcgagggacgcgcgcgcgaaggctcctttgtggacttcacggccgccaacatctgggcgcagcgcgggccaccgctggccgtctcgccgccgcgtcgccttggggacccgagggggctcagccccaaggacggagacttcgattcgggaccagccccccgggatgcggtagcggccgctgtgcggaggccgcgaagcagctgcagccgccgccgcgcagatccacgctggctccgtgcgccatggtcacccacagcaagtttcccgccgccgggatgagccgccccctggacaccagcctgcgcctcaagaccttcagctccaagagcgagtaccagctggtggtgaacgcagtgcgcaagctgcaggagagcggcttctactggagcgcagtgaccggcggcgaggcgaacctgctgctcagtgccgagcccgccggcacctttctgatccgcgacagctcggaccagcgccacttcttcacgctcagcgtcaagacccagtctgggaccaagaacctgcgcatccagtgtgaggggggcagcttctctctgcagagcgatccccggagcacgcagcccgtgccccgcttcgactgcgtgctcaagctggtgcaccactacatgccgccccctggagccccctccttcccctcgccacctactgaaccctcctccgaggtgcccgagcagccgtctgcccagccactccctgggagtccccccagaagagcctattacatctactccgggggcgagaagatccccctggtgttgagccggcccctctcctccaacgtggccactcttcagcatctctgtcggaagaccgtcaacggccacctggactcctatgagaaagtcacccagctgccggggcccattcgggagttcctggaccagtacgatgccccgctttaaggggtaaagggcgcaaagggcatgggtcgggagaggggacgcaggcccctctcctccgtggcacatggcacaagcacaagaagccaaccaggagagagtcctgtagctctggggggaaagagggcggacaggcccctccctctgccctctccctgcagaatgtggcaggcggacctggaatgtgttggagggaagggggagtaccacctgagtctccagcttctccggaggagccagctgtcctggtgggacgatagcaaccacaagtggattctccttcaattcctcagcttcccctctgcctccaaacaggggacacttcgggaatgctgaactaatgagaactgccagggaatcttcaaactttccaacggaacttgtttgctctttgatttggtttaaacctgagctggttgtggagcctgggaaaggtggaagagagagaggtcctgagggccccagggctgcgggctggcgaaggaaatggtcacaccccccgcccaccccaggcgaggatcctggtgacatgctcctctccctggctccggggagaagggcttggggtgacctgaagggaaccatcctggtaccccacatcctctcctccgggacagtcaccgaaaacacaggttccaaagtctacctggtgcctgagagcccagggcccttcctccgttttaagggggaagcaacatttggaggggatggatgggctggtcagctggtctccttttcctactcatactataccttcctgtacctgggtggatggagcgggaggatggaggagacgggacatctttcacctcaggctcctggtagagaagacaggggattctactctgtgcctcctgactatgtctggctaagagattcgccttaaatgctccctgtcccatggagagggacccagcataggaaagccacatactcagcctggatgggtggagaggctgagggactcactggagggcaccaagccagcccacagccagggaagtggggagggggggcggaaacccatgcctcccagctgagcactgggaatgtcagcccagtaagtattggccagtcaggcgcctcgtggtcagagcagagccaccaggtcccactgccccgagccctgcacagccctccctcctgcctgggtgggggaggctggaggtcattggagaggctggactgctgccaccccgggtgctcccgctctgccatagcactgatcagtgacaatttacaggaatgtagcagcgatggaattacctggaacagttttttgtttttgtttttgtttttgtttttgtgggggggggcaactaaacaaacacaaagtattctgtgtcaggtattgggctggacagggcagttgtgtgttggggtggtttttttctctatttttttgtttgtttcttgttttttaataatgtttacaatctgcctcaatcactctgtcttttataaagattccacctccagtcctctctcctcccccctactcaggcccttgaggctattaggagatgcttgaagaactcaacaaaatcccaatccaagtcaaactttgcacatatttatatttatattcagaaaagaaacatttcagtaatttataataaagagcactattttttaatgaaaaac

SEQ ID NO: 52 - RNA, 4704 nt, Homo sapiens
  source 1..4704: mol_type = mRNA
ggagagggagaaggctctcgggcggagagaggtcctgcccagctgttggcgaggagtttcctgtttcccccgcagcgctgagttgaagttgagtgagtcactcgcgcgcacggagcgacgacacccccgcgcgtgcacccgctcgggacaggagccggactcctgtgcagcttccctcggccgccgggggcctccccgcgcctcgccggcctccaggccccctcctggctggcgagcgggcgccacatctggcccgcacatctgcgctgccggcccggcgcggggtccggagagggcgcggcgcggaggcgcagccaggggtccgggaaggcgccgtccgctgcgctgggggctcggtctatgacgagcagcggggtctgccatgggtcgggggctgctcaggggcctgtggccgctgcacatcgtcctgtggacgcgtatcgccagcacgatcccaccgcacgttcagaagtcggatgtggaaatggaggcccagaaagatgaaatcatctgccccagctgtaataggactgcccatccactgagacatattaataacgacatgatagtcactgacaacaacggtgcagtcaagtttccacaactgtgtaaattttgtgatgtgagattttccacctgtgacaaccagaaatcctgcatgagcaactgcagcatcacctccatctgtgagaagccacaggaagtctgtgtggctgtatggagaaagaatgacgagaacataacactagagacagtttgccatgaccccaagctcccctaccatgactttattctggaagatgctgcttctccaaagtgcattatgaaggaaaaaaaaaagcctggtgagactttcttcatgtgttcctgtagctctgatgagtgcaatgacaacatcatcttctcagaagaatataacaccagcaatcctgacttgttgctagtcatatttcaagtgacaggcatcagcctcctgccaccactgggagttgccatatctgtcatcatcatcttctactgctaccgcgttaaccggcagcagaagctgagttcaacctgggaaaccggcaagacgcggaagctcatggagttcagcgagcactgtgccatcatcctggaagatgaccgctctgacatcagctccacgtgtgccaacaacatcaaccacaacacagagctgctgcccattgagctggacaccctggtggggaaaggtcgctttgctgaggtctataaggccaagctgaagcagaacacttcagagcagtttgagacagtggcagtcaagatctttccctatgaggagtatgcctcttggaagacagagaaggacatcttctcagacatcaatctgaagcatgagaacatactccagttcctgacggctgaggagcggaagacggagttggggaaacaatactggctgatcaccgccttccacgccaagggcaacctacaggagtacctgacgcggcatgtcatcagctgggaggacctgcgcaagctgggcagctccctcgcccgggggattgctcacctccacagtgatcacactccatgtgggaggcccaagatgcccatcgtgcacagggacctcaagagctccaatatcctcgtgaagaacgacctaacctgctgcctgtgtgactttgggctttccctgcgtctggaccctactctgtctgtggatgacctggctaacagtgggcaggtgggaactgcaagatacatggctccagaagtcctagaatccaggatgaatttggagaatgttgagtccttcaagcagaccgatgtctactccatggctctggtgctctgggaaatgacatctcgctgtaatgcagtgggagaagtaaaagattatgagcctccatttggttccaaggtgcgggagcacccctgtgtcgaaagcatgaaggacaacgtgttgagagatcgagggcgaccagaaattcccagcttctggctcaaccaccagggcatccagatggtgtgtgagacgttgactgagtgctgggaccacgacccagaggcccgtctcacagcccagtgtgtggcagaacgcttcagtgagctggagcatctggacaggctctcggggaggagctgctcggaggagaagattcctgaagacggctccctaaacactaccaaatagctcttctggggcaggctgggccatgtccaaagaggctgcccctctcaccaaagaacagaggcagcaggaagctgcccctgaactgatgcttcctggaaaaccaagggggtcactcccctccctgtaagctgtggggataagcagaaacaacagcagcagggagtgggtgacatagagcattctatgcctttgacattgtcataggataagctgtgttagcacttcctcaggaaatgagattgatttttacaatagccaataacatttgcactttattaatgcctgtatataaatatgaatagctatgttttatatatatatatatatatctatatatgtctatagctctatatatatagccataccttgaaaagagacaaggaaaaacatcaaatattcccaggaaattggttttattggagaactccagaaccaagcagagaaggaagggacccatgacagcattagcatttgacaatcacacatgcagtggttctctgactgtaaaacagtgaactttgcatgaggaaagaggctccatgtctcacagccagctatgaccacattgcacttgcttttgcaaaataatcattccctgcctagcacttctcttctggccatggaactaagtacagtggcactgtttgaggaccagtgttcccggggttcctgtgtgcccttatttctcctggacttttcatttaagctccaagccccaaatctggggggctagtttagaaactctccctcaacctagtttagaaactctaccccatctttaataccttgaatgttttgaaccccactttttaccttcatgggttgcagaaaaatcagaacagatgtccccatccatgcgattgccccaccatctactaatgaaaaattgttctttttttcatctttcccctgcacttatgttactattctctgctcccagccttcatccttttctaaaaaggagcaaattctcactctaggctttatcgtgtttactttttcattacacttgacttgattttctagttttctatacaaacaccaatgggttccatctttctgggctcctgattgctcaagcacagtttggcctgatgaagaggatttcaactacacaatactatcattgtcaggactatgacctcaggcactctaaacatatgttttgtttggtcagcacagcgtttcaaaaagtgaagccactttataaatatttggagattttgcaggaaaatctggatccccaggtaaggatagcagatggttttcagttatctccagtccacgttcacaaaatgtgaaggtgtggagacacttacaaagctgcctcacttctcactgtaaacattagctctttccactgcctacctggaccccagtctaggaattaaatctgcacctaaccaaggtcccttgtaagaaatgtccattcaagcagtcattctctgggtatataatatgattttgactaccttatctggtgttaagatttgaagttggccttttattggactaaaggggaactcctttaagggtctcagttagcccaagtttcttttgcttatatgttaatagttttaccctctgcattggagagaggagtgctttactccaagaagctttcctcatggttaccgttctctccatcatgccagccttctcaacctttgcagaaattactagagaggatttgaatgtgggacacaaaggtcccatttgcagttagaaaatttgtgtccacaaggacaagaacaaagtatgagctttaaaactccataggaaacttgttaatcaacaaagaagtgttaatgctgcaagtaatctcttttttaaaactttttgaagctacttattttcagccaaataggaatattagagagggactggtagtgagaatatcagctctgtttggatggtggaaggtctcattttattgagatttttaagatacatgcaaaggtttggaaatagaacctctaggcaccctcctcagtgtgggtgggctgagagttaaagacagtgtggctgcagtagcatagaggcgcctagaaattccacttgcaccgtagggcatgctgataccatcccaatagctgttgcccattgacctctagtggtgagtttctagaatactggtccattcatgagatattcaagattcaagagtattctcacttctgggttatcagcataaactggaatgtagtgtcagaggatactgtggcttgttttgtttatgtttttttttcttattcaagaaaaaagaccaaggaataacattctgtagttcctaaaaatactgacttttttcactactatacataaagggaaagttttattcttttatggaacacttcagctgtactcatgtattaaaataggaatgtgaatgctatatactctttttatatcaaaagtctcaagcacttatttttattctatgcattgtttgtcttttacataaataaaatgtttattagattgaataaagcaaaatactcaggtgagcatcctgcctcctgttcccattcctagtagctaaa

SEQ ID NO: 53 - RNA, 1953 nt, Homo sapiens
  source 1..1953: mol_type = mRNA
acagaacccagaaaaacaactcattcgctttcatttcctcactgactataaaagaatagagaaggaagggcttcagtgaccggctgcctggctgacttacagcagtcagactctgacaggatcatggctatgatggaggtccaggggggacccagcctgggacagacctgcgtgctgatcgtgatcttcacagtgctcctgcagtctctctgtgtggctgtaacttacgtgtactttaccaacgagctgaagcagatgcaggacaagtactccaaaagtggcattgcttgtttcttaaaagaagatgacagttattgggaccccaatgacgaagagagtatgaacagcccctgctggcaagtcaagtggcaactccgtcagctcgttagaaagatgattttgagaacctctgaggaaaccatttctacagttcaagaaaagcaacaaaatatttctcccctagtgagagaaagaggtcctcagagagtagcagctcacataactgggaccagaggaagaagcaacacattgtcttctccaaactccaagaatgaaaaggctctgggccgcaaaataaactcctgggaatcatcaaggagtgggcattcattcctgagcaacttgcacttgaggaatggtgaactggtcatccatgaaaaagggttttactacatctattcccaaacatactttcgatttcaggaggaaataaaagaaaacacaaagaacgacaaacaaatggtccaatatatttacaaatacacaagttatcctgaccctatattgttgatgaaaagtgctagaaatagttgttggtctaaagatgcagaatatggactctattccatctatcaagggggaatatttgagcttaaggaaaatgacagaatttttgtttctgtaacaaatgagcacttgatagacatggaccatgaagccagtttttttggggcctttttagttggctaactgacctggaaagaaaaagcaataacctcaaagtgactattcagttttcaggatgatacactatgaagatgtttcaaaaaatctgaccaaaacaaacaaacagaaaacagaaaacaaaaaaacctctatgcaatctgagtagagcagccacaaccaaaaaattctacaacacacactgttctgaaagtgactcacttatcccaagagaatgaaattgctgaaagatctttcaggactctacctcatatcagtttgctagcagaaatctagaagactgtcagcttccaaacattaatgcaatggttaacatcttctgtctttataatctactccttgtaaagactgtagaagaaagagcaacaatccatctctcaagtagtgtatcacagtagtagcctccaggtttccttaagggacaacatccttaagtcaaaagagagaagaggcaccactaaaagatcgcagtttgcctggtgcagtggctcacacctgtaatcccaacattttgggaacccaaggtgggtagatcacgagatcaagagatcaagaccatagtgaccaacatagtgaaaccccatctctactgaaagtacaaaaattagctgggtgtgttggcacatgcctgtagtcccagctacttgagaggctgaggcaagagaattgtttgaacccgggaggcagaggttgcagtgtggtgagatcatgccactacactccagcctggcgacagagcgagacttggtttcaaaaaaaaaaaaaaaaaaaacttcagtaagtacgtgttatttttttcaataaaattctattacagtatgtcatgtttgctgtagtgctcatatttattgttgtttttgttttagtactcacttgtttcataatatcaagattactaaaaatgggggaaaagacttctaatctttttttcataatatctttgacacatattacagaagaaataaatttcttacttttaatttaatatga

SEQ ID NO: 54 - RNA, 2724 nt, Homo sapiens
  source 1..2724: mol_type = mRNA
gatgggattggggttttcccctcccatgtgctcaagactggcgctaaaagttttgagcttctcaaaagtctagagccaccgtccagggagcaggtagctgctgggctccggggacactttgcgttcgggctgggagcgtgctttccacgacggtgacacgcttccctggattggcagccagactgccttccgggtcactgccatggaggagccgcagtcagatcctagcgtcgagccccctctgagtcaggaaacattttcagacctatggaaactacttcctgaaaacaacgttctgtcccccttgccgtcccaagcaatggatgatttgatgctgtccccggacgatattgaacaatggttcactgaagacccaggtccagatgaagctcccagaatgccagaggctgctccccccgtggcccctgcaccagcagctcctacaccggcggcccctgcaccagccccctcctggcccctgtcatcttctgtcccttcccagaaaacctaccagggcagctacggtttccgtctgggcttcttgcattctgggacagccaagtctgtgacttgcacgtactcccctgccctcaacaagatgttttgccaactggccaagacctgccctgtgcagctgtgggttgattccacacccccgcccggcacccgcgtccgcgccatggccatctacaagcagtcacagcacatgacggaggttgtgaggcgctgcccccaccatgagcgctgctcagatagcgatggtctggcccctcctcagcatcttatccgagtggaaggaaatttgcgtgtggagtatttggatgacagaaacacttttcgacatagtgtggtggtgccctatgagccgcctgaggttggctctgactgtaccaccatccactacaactacatgtgtaacagttcctgcatgggcggcatgaaccggaggcccatcctcaccatcatcacactggaagactccagtggtaatctactgggacggaacagctttgaggtgcgtgtttgtgcctgtcctgggagagaccggcgcacagaggaagagaatctccgcaagaaaggggagcctcaccacgagctgcccccagggagcactaagcgagcactgcccaacaacaccagctcctctccccagccaaagaagaaaccactggatggagaatatttcacccttcaggaccagaccagctttcaaaaagaaaattgttaaagagagcatgaaaatggttctatgactttgcctgatacagatgctacttgacttacgatggtgttacttcctgataaactcgtcgtaagttgaaaatattatccgtgggcgtgagcgcttcgagatgttccgagagctgaatgaggccttggaactcaaggatgcccaggctgggaaggagccaggggggagcagggctcactccagccacctgaagtccaaaaagggtcagtctacctcccgccataaaaaactcatgttcaagacagaagggcctgactcagactgacattctccacttcttgttccccactgacagcctcccacccccatctctccctcccctgccattttgggttttgggtctttgaacccttgcttgcaataggtgtgcgtcagaagcacccaggacttccatttgctttgtcccggggctccactgaacaagttggcctgcactggtgttttgttgtggggaggaggatggggagtaggacataccagcttagattttaaggtttttactgtgagggatgtttgggagatgtaagaaatgttcttgcagttaagggttagtttacaatcagccacattctaggtaggggcccacttcaccgtactaaccagggaagctgtccctcactgttgaattttctctaacttcaaggcccatatctgtgaaatgctggcatttgcacctacctcacagagtgcattgtgagggttaatgaaataatgtacatctggccttgaaaccaccttttattacatggggtctagaacttgacccccttgagggtgcttgttccctctccctgttggtcggtgggttggtagtttctacagttgggcagctggttaggtagagggagttgtcaagtctctgctggcccagccaaaccctgtctgacaacctcttggtgaaccttagtacctaaaaggaaatctcaccccatcccacaccctggaggatttcatctcttgtatatgatgatctggatccaccaagacttgttttatgctcagggtcaatttcttttttcttttttttttttttttttctttttctttgagactgggtctcgctttgttgcccaggctggagtggagtggcgtgatcttggcttactgcagcctttgcctccccggctcgagcagtcctgcctcagcctccggagtagctgggaccacaggttcatgccaccatggccagccaacttttgcatgttttgtagagatggggtctcacagtgttgcccaggctggtctcaaactcctgggctcaggcgatccacctgtctcagcctcccagagtgctgggattacaattgtgagccaccacgtccagctggaagggtcaacatcttttacattctgcaagcacatctgcattttcaccccacccttcccctccttctccctttttatatcccatttttatatcgatctcttattttacaataaaactttgctgccacctgtgtgtctgaggggtg

SEQ ID NO: 55 - RNA, 3572 nt, Homo sapiens
  source 1..3572: mol_type = mRNA
acctgcacttctgggggcgtcgagcctggcggtagaatcttcccagtaggcggcgcgggagggaaaagaggattgaggggctaggccgggcggatcccgtcctcccccgatgtgagcagttttccgaaaccccgtcaggcgaaggctgcccagagaggtggagtcggtagcggggccgggaacatgaggcagtctctcctattcctgaccagcgtggttcctttcgtgctggcgccgcgacctccggatgacccgggcttcggcccccaccagagactcgagaagcttgattctttgctctcagactacgatattctctctttatctaatatccagcagcattcggtaagaaaaagagatctacagacttcaacacatgtagaaacactactaactttttcagctttgaaaaggcattttaaattatacctgacatcaagtactgaacgtttttcacaaaatttcaaggtcgtggtggtggatggtaaaaacgaaagcgagtacactgtaaaatggcaggacttcttcactggacacgtggttggtgagcctgactctagggttctagcccacataagagatgatgatgttataatcagaatcaacacagatggggccgaatataacatagagccactttggagatttgttaatgataccaaagacaaaagaatgttagtttataaatctgaagatatcaagaatgtttcacgtttgcagtctccaaaagtgtgtggttatttaaaagtggataatgaagagttgctcccaaaagggttagtagacagagaaccacctgaagagcttgttcatcgagtgaaaagaagagctgacccagatcccatgaagaacacgtgtaaattattggtggtagcagatcatcgcttctacagatacatgggcagaggggaagagagtacaactacaaattacttaatagagctaattgacagagttgatgacatctatcggaacacttcatgggataatgcaggttttaaaggctatggaatacagatagagcagattcgcattctcaagtctccacaagaggtaaaacctggtgaaaagcactacaacatggcaaaaagttacccaaatgaagaaaaggatgcttgggatgtgaagatgttgctagagcaatttagctttgatatagctgaggaagcatctaaagtttgcttggcacaccttttcacataccaagattttgatatgggaactcttggattagcttatgttggctctcccagagcaaacagccatggaggtgtttgtccaaaggcttattatagcccagttgggaagaaaaatatctatttgaatagtggtttgacgagcacaaagaattatggtaaaaccatccttacaaaggaagctgacctggttacaactcatgaattgggacataattttggagcagaacatgatccggatggtctagcagaatgtgccccgaatgaggaccagggagggaaatatgtcatgtatcccatagctgtgagtggcgatcacgagaacaataagatgttttcaaactgcagtaaacaatcaatctataagaccattgaaagtaaggcccaggagtgttttcaagaacgcagcaataaagtttgtgggaactcgagggtggatgaaggagaagagtgtgatcctggcatcatgtatctgaacaacgacacctgctgcaacagcgactgcacgttgaaggaaggtgtccagtgcagtgacaggaacagtccttgctgtaaaaactgtcagtttgagactgcccagaagaagtgccaggaggcgattaatgctacttgcaaaggcgtgtcctactgcacaggtaatagcagtgagtgcccgcctccaggaaatgctgaagatgacactgtttgcttggatcttggcaagtgtaaggatgggaaatgcatccctttctgcgagagggaacagcagctggagtcctgtgcatgtaatgaaactgacaactcctgcaaggtgtgctgcagggacctttctggccgctgtgtgccctatgtcgatgctgaacaaaagaacttatttttgaggaaaggaaagccctgtacagtaggattttgtgacatgaatggcaaatgtgagaaacgagtacaggatgtaattgaacgattttgggatttcattgaccagctgagcatcaatacttttggaaagtttttagcagacaacatcgttgggtctgtcctggttttctccttgatattttggattcctttcagcattcttgtccattgtgtggataagaaattggataaacagtatgaatctctgtctctgtttcaccccagtaacgtcgaaatgctgagcagcatggattctgcatcggttcgcattatcaaaccctttcctgcgccccagactccaggccgcctgcagcctgcccctgtgatcccttcggcgccagcagctccaaaactggaccaccagagaatggacaccatccaggaagaccccagcacagactcacatatggacgaggatgggtttgagaaggaccccttcccaaatagcagcacagctgccaagtcatttgaggatctcacggaccatccggtcaccagaagtgaaaaggctgcctcctttaaactgcagcgtcagaatcgtgttgacagcaaagaaacagagtgctaatttagttctcagctcttctgacttaagtgtgcaaaatatttttatagatttgacctacaaatcaatcacagcttgtattttgtgaagactgggaagtgacttagcagatgctggtcatgtgtttgaacttcctgcaggtaaacagttcttgtgtggtttggcccttctccttttgaaaaggtaaggtgaaggtgaatctagcttattttgaggctttcaggttttagtttttaaaatatcttttgacctgtggtgcaaaagcagaaaatacagctggattgggttatgaatatttacgtttttgtaaattaatcttttatattgataacagcactgactagggaaatgatcagtttttttttatacactgtaatgaaccgctgaatatgaggcatttggcatttatttgtgatgacaactggaatagttttttttttttttttttttttttgccttcaactaaaaacaaaggagataaatctagtatacattgtctctaaattgtgggtctatttctagttattacccagagtttttatgtagcagggaaaatatatatctaaatttagaaatcatttgggttaatatggctcttcataattctaagactaatgctctctagaaacctaaccacctaccttacagtgagggctatacatggtagccagttgaatttatggaatctaccaactgtttagggccctgatttgctgggcagtttttctgtattttataagtatcttcatgtatccctgttactgatagggatacatgctcttagaaaattcactattggctgggagtggtggctcatgcctgtaatcccagcacttggagaggctgaggttgcgccactacactccagcctgggtgacagagtgagactctgcctcaaaaaaaaaaaaaaaaaaaaa

SEQ ID NO: 56 - RNA, 3008 nt, Homo sapiens
  source 1..3008: mol_type = mRNA
taattatgggtctgtaaccaccctggactgggtgctcctcactgacggacttgtctgaacctctctttgtctccagcgcccagcactgggcctggcaaaacctgagacgcccggtacatgttggccaaatgaatgaaccagattcagaccggcaggggcgctgtggtttaggaggggcctggggtttctcccaggaggtttttgggcttgcgctggagggctctggactcccgtttgcgccagtggcctgcatcctggtcctgtcttcctcatgtttgaatttctttgctttcctagtctggggagcagggaggagccctgtgccctgtcccaggatccatgggtaggaacaccatggacagggagagcaaacggggccatctgtcaccaggggcttagggaaggccgagccagcctgggtcaaagaagtcaaaggggctgcctggaggaggcagcctgtcagctggtgcatcagaggctgtggccaggccagctgggctcggggagcgccagcctgagaggagcgcgtgagcgtcgcgggagcctcgggcaccatgagcgacgtggctattgtgaaggagggttggctgcacaaacgaggggagtacatcaagacctggcggccacgctacttcctcctcaagaatgatggcaccttcattggctacaaggagcggccgcaggatgtggaccaacgtgaggctcccctcaacaacttctctgtggcgcagtgccagctgatgaagacggagcggccccggcccaacaccttcatcatccgctgcctgcagtggaccactgtcatcgaacgcaccttccatgtggagactcctgaggagcgggaggagtggacaaccgccatccagactgtggctgacggcctcaagaagcaggaggaggaggagatggacttccggtcgggctcacccagtgacaactcaggggctgaagagatggaggtgtccctggccaagcccaagcaccgcgtgaccatgaacgagtttgagtacctgaagctgctgggcaagggcactttcggcaaggtgatcctggtgaaggagaaggccacaggccgctactacgccatgaagatcctcaagaaggaagtcatcgtggccaaggacgaggtggcccacacactcaccgagaaccgcgtcctgcagaactccaggcaccccttcctcacagccctgaagtactctttccagacccacgaccgcctctgctttgtcatggagtacgccaacgggggcgagctgttcttccacctgtcccgggagcgtgtgttctccgaggaccgggcccgcttctatggcgctgagattgtgtcagccctggactacctgcactcggagaagaacgtggtgtaccgggacctcaagctggagaacctcatgctggacaaggacgggcacattaagatcacagacttcgggctgtgcaaggaggggatcaaggacggtgccaccatgaagaccttttgcggcacacctgagtacctggcccccgaggtgctggaggacaatgactacggccgtgcagtggactggtgggggctgggcgtggtcatgtacgagatgatgtgcggtcgcctgcccttctacaaccaggaccatgagaagctttttgagctcatcctcatggaggagatccgcttcccgcgcacgcttggtcccgaggccaagtccttgctttcagggctgctcaagaaggaccccaagcagaggcttggcgggggctccgaggacgccaaggagatcatgcagcatcgcttctttgccggtatcgtgtggcagcacgtgtacgagaagaagctcagcccacccttcaagccccaggtcacgtcggagactgacaccaggtattttgatgaggagttcacggcccagatgatcaccatcacaccacctgaccaagatgacagcatggagtgtgtggacagcgagcgcaggccccacttcccccagttctcctactcggccagcggcacggcctgaggcggcggtggactgcgctggacgatagcttggagggatggagaggcggcctcgtgccatgatctgtatttaatggtttttatttctcgggtgcatttgagagaagccacgctgtcctctcgagcccagatggaaagacgtttttgtgctgtgggcagcaccctcccccgcagcggggtagggaagaaaactatcctgcgggttttaatttatttcatccagtttgttctccgggtgtggcctcagccctcagaacaatccgattcacgtagggaaatgttaaggacttctgcagctatgcgcaatgtggcattggggggccgggcaggtcctgcccatgtgtcccctcactctgtcagccagccgccctgggctgtctgtcaccagctatctgtcatctctctggggccctgggcctcagttcaacctggtggcaccagatgcaacctcactatggtatgctggccagcaccctctcctgggggtggcaggcacacagcagccccccagcactaaggccgtgtctctgaggacgtcatcggaggctgggcccctgggatgggaccagggatgggggatgggccagggtttacccagtgggacagaggagcaaggtttaaatttgttattgtgtattatgttgttcaaatgcattttgggggtttttaatctttgtgacaggaaagccctcccccttccccttctgtgtcacagttcttggtgactgtcccaccgggagcctccccctcagatgatctctccacggtagcacttgaccttttcgacgcttaacctttccgctgtcgccccaggccctccctgactccctgtgggggtggccatccctgggcccctccacgcctcctggccagacgctgccgctgccgctgcaccacggcgtttttttacaacattcaactttagtatttttactattataatataatatggaaccttccctccaaattcttcaataaaagttgcttttcaaaaaaaaaaaaaaaaaaaaaa

SEQ ID NO: 57 - RNA, 5270 nt, Homo sapiens
  source 1..5270: mol_type = mRNA
aaagtgattgattcggatactgacactgtaggatctggggagagaggaacaaaggaccgtgaaagctgctctgtaaaagctgacacagccctcccaagtgagcaggactgttcttcccactgcaatctgacagtttactgcatgcctggagagaacacagcagtaaaaaccaggtttgctactggaaaaagaggaaagagaagactttcattgacggacccagccatggcagcgtagcagccctgcgttttagacggcagcagctcgggactctggacgtgtgtttgccctcaagtttgctaagctgctggtttattactgaagaaagaatgtggcagattgttttctttactctgagctgtgatcttgtcttggccgcagcctataacaactttcggaagagcatggacagcataggaaagaagcaatatcaggtccagcatgggtcctgcagctacactttcctcctgccagagatggacaactgccgctcttcctccagcccctacgtgtccaatgctgtgcagagggacgcgccgctcgaatacgatgactcggtgcagaggctgcaagtgctggagaacatcatggaaaacaacactcagtggctaatgaagcttgagaattatatccaggacaacatgaagaaagaaatggtagagatacagcagaatgcagtacagaaccagacggctgtgatgatagaaatagggacaaacctgttgaaccaaacagcggagcaaacgcggaagttaactgatgtggaagcccaagtattaaatcagaccacgagacttgaacttcagctcttggaacactccctctcgacaaacaaattggaaaaacagattttggaccagaccagtgaaataaacaaattgcaagataagaacagtttcctagaaaagaaggtgctagctatggaagacaagcacatcatccaactacagtcaataaaagaagagaaagatcagctacaggtgttagtatccaagcaaaattccatcattgaagaactagaaaaaaaaatagtgactgccacggtgaataattcagttcttcagaagcagcaacatgatctcatggagacagttaataacttactgactatgatgtccacatcaaactcagctaaggaccccactgttgctaaagaagaacaaatcagcttcagagactgtgctgaagtattcaaatcaggacacaccacgaatggcatctacacgttaacattccctaattctacagaagagatcaaggcctactgtgacatggaagctggaggaggcgggtggacaattattcagcgacgtgaggatggcagcgttgattttcagaggacttggaaagaatataaagtgggatttggtaacccttcaggagaatattggctgggaaatgagtttgtttcgcaactgactaatcagcaacgctatgtgcttaaaatacaccttaaagactgggaagggaatgaggcttactcattgtatgaacatttctatctctcaagtgaagaactcaattataggattcaccttaaaggacttacagggacagccggcaaaataagcagcatcagccaaccaggaaatgattttagcacaaaggatggagacaacgacaaatgtatttgcaaatgttcacaaatgctaacaggaggctggtggtttgatgcatgtggtccttccaacttgaacggaatgtactatccacagaggcagaacacaaataagttcaacggcattaaatggtactactggaaaggctcaggctattcgctcaaggccacaaccatgatgatccgaccagcagatttctaaacatcccagtccacctgaggaactgtctcgaactattttcaaagacttaagcccagtgcactgaaagtcacggctgcgcactgtgtcctcttccaccacagagggcgtgtgctcggtgctgacgggacccacatgctccagattagagcctgtaaactttatcacttaaacttgcatcacttaacggaccaaagcaagaccctaaacatccataattgtgattagacagaacacctatgcaaagatgaacccgaggctgagaatcagactgacagtttacagacgctgctgtcacaaccaagaatgttatgtgcaagtttatcagtaaataactggaaaacagaacacttatgttatacaatacagatcatcttggaactgcattcttctgagcactgtttatacactgtgtaaatacccatatgtcctgaattcaccatcactatcacaattaaaaggaagaaaaaaactctctaagccataaaaagacatattcagggatattctgagaaggggttactagaagtttaatatttggaaaaacagttagtgcatttttactccatctcttaggtgctttaaatttttatttcaaaaacagcgtatttacatttatgttgacagcttagttataagttaatgctcaaatacgtatttcaaatttatatggtagaaacttccagaatctctgaaattatcaacagaaacgtgccattttagtttatatgcagaccgtactatttttttctgcctgattgttaaatatgaaggtatttttagtaattaaatataacttattaggggatatgcctatgtttaacttttatgataatatttacaattttataatttgtttccaaaagacctaattgtgccttgtgataaggaaacttcttacttttaatgatgaggaaaattatacatttcattctatgacaaagaaactttactatcttctcactattctaaaacagaggtctgttttctttcctagtaagatatatttttatagaactagactacaatttaatttctggttgagaaaagccttctatttaagaaatttacaaagctatatgtctcaagattcacccttaaatttacttaaggaaaaaaataattgacactagtaagtttttttatgtcaatcagcaaactgaaaaaaaaaaaagggtttcaaagtgcaaaaacaaaatctgatgttcataatatatttaaatatttaccaaaaatttgagaacacagggctgggcgcagtggctcacacctataatcccagtacattggtaggcaaggtgggcagatcacctgaggtcaggagttcaagaccagcctggacaacatggtgaaaccctgtctctactaaataatacaaaaattagccaggcgtgctggcgggcacctgtaatcccagctactcgggaggctgaggcagggagaattgcttgcaccagggaggtagaggttgcagtgagccaagatcgcaccactgcactccagccggggcaacagagcaagactccatctcaaaaaaaaaaaaaaaaaaagaaagaaaagaaaatttgagaacacagctttatactcgggactacaaaaccataaactcctggagttttaactccttttgaaattttcatagtacaattaatactaatgaacatttgtgtaaagctttataatttaaaggcaatttctcatatattcttttctgaatcatttgcaaggaagttcagagtccagtctgtaactagcatctactatatgtctgtcttcaccttacagtgttctaccattattttttctttattccatttcaaaatctaatttattttaccccaacttctccccaccacttgacgtagttttagaacacacaggtgttgctacatatttggagtcaatgatggactctggcaaagtcaaggctctgttttatttccaccaaggtgcacttttccaacaactatttaactagttaagaacctccctatcttagaactgtatctactttatatttaagaaggttttatgaattcaacaacggtatcatggccttgtatcaagttgaaaaacaactgaaaataagaaaatttcacagcctcgaaagacaacaacaagtttctaggatatctcaatgacaagagtgatggatacttaggtagggaaacgctaatgcaggaaaaactggcaacaacacaatttatatcaattctctttgtaggcaggtgataaaaaattcaaggacaaatctcattatgtcattgtgcatcatatataatctcttatgagcgagaatggggggaatttgtgtttttactttacacttcaattccttacacggtatttcaaacaaacagttttgctgagaggagcttttgtctctccttaagaaaatgtttataaagctgaaaggaaatcaaacagtaatcttaaaaatgaaaacaaaacaacccaacaacctagataactacagtgatcagggagcacagttcaactccttgttatgttttagtcatatggcctactcaaacagctaaataacaacaccagtggcagataaaaatcaccatttatctttcagctattaatcttttgaatgaataaactgtgacaaacaaattaacatttttgaacatgaaaggcaacttctgcacaatcctgtatccaagcaaactttaaattatccacttaattattacttaatcttaaaaaaaattagaacccagaacttttcaatgaagcatttgaaagttgaagtggaatttaggaaagccataaaaatataaatactgttatcacagcaccagcaagccataatctttatacctatcagttctatttctattaacagtaaaaacattaagcaagatataagactacctgcccaagaattcagtcttttttcatttttgtttttctcagttctgaggatgttaatcgtcaaattttctttggactgcattcctcactactttttgcacaatggtctcacgttctcacatttgttctcgcgaataaattgataaaaggtgttaagttctgtgaatgtctttttaattatgggcataattgtgcttgactggataaaaacttaagtccacccttatgtttataataatttcttgagaacagcaaactgcatttaccatcgtaaaacaacatctgacttacgggagctgcagggaagtggtgagacagttcgaacggctcctcagaaatccagtgacccaattctaaagaccatagcacctgcaagtgacacaacaagcagatttattatacatttattagccttagcaggcaataaaccaagaatcactttgaagacacagcaaaaagtgatacactccgcagatctgaaatagatgtgttctcagacaacaaagtcccttcagaatcttcatgttgcataaatgttatgaatattaataaaaagttgattgagaaaaa

SEQ ID NO: 58 - RNA, 6492 nt, Homo sapiens
  source 1..6492: mol_type = mRNA
tttctgtgaagcagaagtctgggaatcgatctggaaatcctcctaatttttactccctctccccgcgactcctgattcattgggaagtttcaaatcagctataactggagagtgctgaagattgatgggatcgttgccttatgcatttgttttggttttacaaaaaggaaacttgacagaggatcatgctgtacttaaaaaatacaacatcacagaggaagtagactgatattaacaatacttactaataataacgtgcctcatgaaataaagatccgaaaggaattggaataaaaatttcctgcatctcatgccaagggggaaacaccagaatcaagtgttccgcgtgattgaagacaccccctcgtccaagaatgcaaagcacatccaataaaatagctggattataactcctcttctttctctgggggccgtggggtgggagctggggcgagaggtgccgttggcccccgttgcttttcctctgggaaggatggcgcacgctgggagaacagggtacgataaccgggagatagtgatgaagtacatccattataagctgtcgcagaggggctacgagtgggatgcgggagatgtgggcgccgcgcccccgggggccgcccccgcaccgggcatcttctcctcccagcccgggcacacgccccatccagccgcatcccgggacccggtcgccaggacctcgccgctgcagaccccggctgcccccggcgccgccgcggggcctgcgctcagcccggtgccacctgtggtccacctgaccctccgccaggccggcgacgacttctcccgccgctaccgccgcgacttcgccgagatgtccagccagctgcacctgacgcccttcaccgcgcggggacgctttgccacggtggtggaggagctcttcagggacggggtgaactgggggaggattgtggccttctttgagttcggtggggtcatgtgtgtggagagcgtcaaccgggagatgtcgcccctggtggacaacatcgccctgtggatgactgagtacctgaaccggcacctgcacacctggatccaggataacggaggctgggatgcctttgtggaactgtacggccccagcatgcggcctctgtttgatttctcctggctgtctctgaagactctgctcagtttggccctggtgggagcttgcatcaccctgggtgcctatctgggccacaagtgaagtcaacatgcctgccccaaacaaatatgcaaaaggttcactaaagcagtagaaataatatgcattgtcagtgatgtaccatgaaacaaagctgcaggctgtttaagaaaaaataacacacatataaacatcacacacacagacagacacacacacacacaacaattaacagtcttcaggcaaaacgtcgaatcagctatttactgccaaagggaaatatcatttattttttacattattaagaaaaaaagatttatttatttaagacagtcccatcaaaactcctgtctttggaaatccgaccactaattgccaagcaccgcttcgtgtggctccacctggatgttctgtgcctgtaaacatagattcgctttccatgttgttggccggatcaccatctgaagagcagacggatggaaaaaggacctgatcattggggaagctggctttctggctgctggaggctggggagaaggtgttcattcacttgcatttctttgccctgggggctgtgatattaacagagggagggttcctgtggggggaagtccatgcctccctggcctgaagaagagactctttgcatatgactcacatgatgcatacctggtgggaggaaaagagttgggaacttcagatggacctagtacccactgagatttccacgccgaaggacagcgatgggaaaaatgcccttaaatcataggaaagtatttttttaagctaccaattgtgccgagaaaagcattttagcaatttatacaatatcatccagtaccttaagccctgattgtgtatattcatatattttggatacgcaccccccaactcccaatactggctctgtctgagtaagaaacagaatcctctggaacttgaggaagtgaacatttcggtgacttccgcatcaggaaggctagagttacccagagcatcaggccgccacaagtgcctgcttttaggagaccgaagtccgcagaacctgcctgtgtcccagcttggaggcctggtcctggaactgagccggggccctcactggcctcctccagggatgatcaacagggcagtgtggtctccgaatgtctggaagctgatggagctcagaattccactgtcaagaaagagcagtagaggggtgtggctgggcctgtcaccctggggccctccaggtaggcccgttttcacgtggagcatgggagccacgacccttcttaagacatgtatcactgtagagggaaggaacagaggccctgggcccttcctatcagaaggacatggtgaaggctgggaacgtgaggagaggcaatggccacggcccattttggctgtagcacatggcacgttggctgtgtggccttggcccacctgtgagtttaaagcaaggctttaaatgactttggagagggtcacaaatcctaaaagaagcattgaagtgaggtgtcatggattaattgacccctgtctatggaattacatgtaaaacattatcttgtcactgtagtttggttttatttgaaaacctgacaaaaaaaaagttccaggtgtggaatatgggggttatctgtacatcctggggcattaaaaaaaaaatcaatggtggggaactataaagaagtaacaaaagaagtgacatcttcagcaaataaactaggaaatttttttttcttccagtttagaatcagccttgaaacattgatggaataactctgtggcattattgcattatataccatttatctgtattaactttggaatgtactctgttcaatgtttaatgctgtggttgatatttcgaaagctgctttaaaaaaatacatgcatctcagcgtttttttgtttttaattgtatttagttatggcctatacactatttgtgagcaaaggtgatcgttttctgtttgagatttttatctcttgattcttcaaaagcattctgagaaggtgagataagccctgagtctcagctacctaagaaaaacctggatgtcactggccactgaggagctttgtttcaaccaagtcatgtgcatttccacgtcaacagaattgtttattgtgacagttatatctgttgtccctttgaccttgtttcttgaaggtttcctcgtccctgggcaattccgcatttaattcatggtattcaggattacatgcatgtttggttaaacccatgagattcattcagttaaaaatccagatggcaaatgaccagcagattcaaatctatggtggtttgacctttagagagttgctttacgtggcctgtttcaacacagacccacccagagccctcctgccctccttccgcgggggctttctcatggctgtccttcagggtcttcctgaaatgcagtggtgcttacgctccaccaagaaagcaggaaacctgtggtatgaagccagacctccccggcgggcctcagggaacagaatgatcagacctttgaatgattctaatttttaagcaaaatattattttatgaaaggtttacattgtcaaagtgatgaatatggaatatccaatcctgtgctgctatcctgccaaaatcattttaatggagtcagtttgcagtatgctccacgtggtaagatcctccaagctgctttagaagtaacaatgaagaacgtggacgtttttaatataaagcctgttttgtcttttgttgttgttcaaacgggattcacagagtatttgaaaaatgtatatatattaagaggtcacgggggctaattgctggctggctgccttttgctgtggggttttgttacctggttttaataacagtaaatgtgcccagcctcttggccccagaactgtacagtattgtggctgcacttgctctaagagtagttgatgttgcattttccttattgttaaaaacatgttagaagcaatgaatgtatataaaagcctcaactagtcatttttttctcctcttcttttttttcattatatctaattattttgcagttgggcaacagagaaccatccctattttgtattgaagagggattcacatctgcatcttaactgctctttatgaatgaaaaaacagtcctctgtatgtactcctctttacactggccagggtcagagttaaatagagtatatgcactttccaaattggggacaagggctctaaaaaaagccccaaaaggagaagaacatctgagaacctcctcggccctcccagtccctcgctgcacaaatactccgcaagagaggccagaatgacagctgacagggtctatggccatcgggtcgtctccgaagatttggcaggggcagaaaactctggcaggcttaagatttggaataaagtcacagaattaaggaagcacctcaatttagttcaaacaagacgccaacattctctccacagctcacttacctctctgtgttcagatgtggccttccatttatatgtgatctttgttttattagtaaatgcttatcatctaaagatgtagctctggcccagtgggaaaaattaggaagtgattataaatcgagaggagttataataatcaagattaaatgtaaataatcagggcaatcccaacacatgtctagctttcacctccaggatctattgagtgaacagaattgcaaatagtctctatttgtaattgaacttatcctaaaacaaatagtttataaatgtgaacttaaactctaattaattccaactgtacttttaaggcagtggctgtttttagactttcttatcacttatagttagtaatgtacacctactctatcagagaaaaacaggaaaggctcgaaatacaagccattctaaggaaattagggagtcagttgaaattctattctgatcttattctgtggtgtcttttgcagcccagacaaatgtggttacacactttttaagaaatacaattctacattgtcaagcttatgaaggttccaatcagatctttattgttattcaatttggatctttcagggattttttttttaaattattatgggacaaaggacatttgttggaggggtgggagggaggaagaatttttaaatgtaaaacattcccaagtttggatcagggagttggaagttttcagaataaccagaactaagggtatgaaggacctgtattggggtcgatgtgatgcctctgcgaagaaccttgtgtgacaaatgagaaacattttgaagtttgtggtacgacctttagattccagagacatcagcatggctcaaagtgcagctccgtttggcagtgcaatggtataaatttcaagctggatatgtctaatgggtatttaaacaataaatgtgcagttttaactaacaggatatttaatgacaaccttctggttggtagggacatctgtttctaaatgtttattatgtacaatacagaaaaaaattttataaaattaagcaatgtgaaactgaattggagagtgataatacaagtcctttagtcttacccagtgaatcattctgttccatgtctttggacaaccatgaccttggacaatcatgaaatatgcatctcactggatgcaaagaaaatcagatggagcatgaatggtactgtaccggttcatctggactgccccagaaaaataacttcaagcaaacatcctatcaacaacaaggttgttctgcataccaagctgagcacagaagatgggaacactggtggaggatggaaaggctcgctcaatcaagaaaattctgagactattaataaataagactgtagtgtagatactgagtaaatccatgcacctaaaccttttggaaaatctgccgtgggccctccagatagctcatttcattaagtttttccctccaaggtagaatttgcaagagtgacagtggattgcatttcttttggggaagctttcttttggtggttttgtttattataccttcttaagttttcaaccaaggtttgcttttgttttgagttactggggttatttttgttttaaataaaaataagtgtacaataagtgtttttgtattgaaagcttttgttatcaagattttcatacttttaccttccatggctctttttaagattgatacttttaagaggtggctgatattctgcaacactgtacacataaaaaatacggtaaggatactttacatggttaaggtaaagtaagtctccagttggccaccattagctataatggcactttgtttgtgttgttggaaaaagtcacattgccattaaactttccttgtctgtctagttaatattgtgaagaaaaataaagtacagtgtgagatactg

SEQ ID NO: 59 - RNA, 2575 nt, Homo sapiens
  source 1..2575: mol_type = mRNA
ggaggaggaagcaagcgagggggctggttcctgagcttcgcaattcctgtgtcgccttctgggctcccagcctgccgggtcgcatgatccctccggccggagctggtttttttgccagccaccgcgaggccggctgagttaccggcatccccgcagccacctcctctcccgacctgtgatacaaaagatcttccgggggctgcacctgcctgcctttgcctaaggcggatttgaatctctttctctcccttcagaatcttatcttggctttggatcttagaagagaatcactaaccagagacgagactcagtgagtgagcaggtgttttggacaatggactggttgagcccatccctattataaaaatgtctcagagcaaccgggagctggtggttgactttctctcctacaagctttcccagaaaggatacagctggagtcagtttagtgatgtggaagagaacaggactgaggccccagaagggactgaatcggagatggagacccccagtgccatcaatggcaacccatcctggcacctggcagacagccccgcggtgaatggagccactggccacagcagcagtttggatgcccgggaggtgatccccatggcagcagtaaagcaagcgctgagggaggcaggcgacgagtttgaactgcggtaccggcgggcattcagtgacctgacatcccagctccacatcaccccagggacagcatatcagagctttgaacaggtagtgaatgaactcttccgggatggggtaaactggggtcgcattgtggcctttttctccttcggcggggcactgtgcgtggaaagcgtagacaaggagatgcaggtattggtgagtcggatcgcagcttggatggccacttacctgaatgaccacctagagccttggatccaggagaacggcggctgggatacttttgtggaactctatgggaacaatgcagcagccgagagccgaaagggccaggaacgcttcaaccgctggttcctgacgggcatgactgtggccggcgtggttctgctgggctcactcttcagtcggaaatgaccagacactgaccatccactctaccctcccacccccttctctgctccaccacatcctccgtccagccgccattgccaccaggagaaccactacatgcagcccatgcccacctgcccatcacagggttgggcccagatctggtcccttgcagctagttttctagaatttatcacacttctgtgagacccccacacctcagttcccttggcctcagaattcacaaaatttccacaaaatctgtccaaaggaggctggcaggtatggaagggtttgtggctgggggcaggagggccctacctgattggtgcaacccttaccccttagcctccctgaaaatgtttttctgccagggagcttgaaagttttcagaacctcttccccagaaaggagactagattgcctttgttttgatgtttgtggcctcagaattgatcattttccccccactctccccacactaacctgggttccctttccttccatccctaccccctaagagccatttaggggccacttttgactagggattcaggctgcttgggataaagatgcaaggaccaggactccctcctcacctctggactggctagagtcctcactcccagtccaaatgtcctccagaagcctctggctagaggccagccccacccaggagggagggggctatagctacaggaagcaccccatgccaaagctagggtggcccttgcagttcagcaccaccctagtcccttcccctccctggctcccatgaccatactgagggaccaactgggcccaagacagatgccccagagctgtttatggcctcagctgcctcacttcctacaagagcagcctgtggcatctttgccttgggctgctcctcatggtgggttcaggggactcagccctgaggtgaaagggagctatcaggaacagctatgggagccccagggtcttccctacctcaggcaggaagggcaggaaggagagcctgctgcatggggtggggtagggctgactagaagggccagtcctgcctggccaggcagatctgtgccccatgcctgtccagcctgggcagccaggctgccaaggccagagtggcctggccaggagctcttcaggcctccctctctcttctgctccacccttggcctgtctcatccccaggggtcccagccaccccgggctctctgctgtacatatttgagactagtttttattccttgtgaagatgatatactatttttgttaagcgtgtctgtatttatgtgtgaggagctgctggcttgcagtgcgcgtgcacgtggagagctggtgcccggagattggacggcctgatgctccctcccctgccctggtccagggaagctggccgagggtcctggctcctgaggggcatctgcccctcccccaacccccaccccacacttgttccagctctttgaaatagtctgtgtgaaggtgaaagtgcagttcagtaataaactgtgtttactcagtgaaaaaaaaaaaaaaaaaa

SEQ ID NO: 60 - RNA, 4088 nt, Homo sapiens
  source 1..4088: mol_type = mRNA
gcggtgagtgctgctccttccgggctcgggcggcgtggggcgggtggggacgcgagggcccgcgggggcccacttccctgatgtggcggcgaacgaggaaggacggggcctgaggcccttcggccaagggtcgagggtcgccgggggctctctgctttctactctcgccaaggttttattggattcggaagccccaacttcgagacttgcagtcaaagcgatttttaaaatgacttgttttcaagcctctggccgccgcccactcttctggcccttggactttgaccaagatgttttctcgcagtttttgcaaggttttaaacttagccctcggcgttcttttaatgtaatacattgaaacgaagatatttcggtggcggcgatatttcatatttcatagttgccactgcgctctgtcattccagtagtcgtctgttgtgtattgtgagaagcaactctgggaaattattggatttacaaccctgaagaatctccctatccctattttgtccccctgcagtaataaatcccattatggagatctcgaaactttataaagggatatagtttgaattctatggagtgtaattttgtgtatgaattatatttttaaaacattgaagagttttcagaaagaaggctagtagagttgattactgatactttatgctaagcagtacttttttggtagtacaatattttgttaggcgtttctgataacactagaaaggacaagttttatcttgtgataaattgattaatgtttacaacatgactgataattatagctgaatagtccttaaatgatgaacaggttatttagtttttaaatgcagtgtaaaaagtgtgctgtggaaattttatggctaactaagtttatggagaaaataccttcagttgatcaagaataatagtggtatacaaagttaggaagaaagtcaacatgatgctgcaggaaatggaaacaaatacaaatgatatttaacaaagatagagtttacagtttttgaactttaagccaaattcatttgacatcaagcactatagcaggcacaggttcaacaaagcttgtgggtattgacttcccccaaaagttgtcagctgaagtaatttagcccacttaagtaaatactatgatgataagctgtgtgaacttagcttttaaatagtgtgaccatatgaaggttttaattacttttgtttattggaataaaatgagattttttgggttgtcatgttaaagtgcttatagggaaagaagcctgcatataattttttaccttgtggcataatcagtaattggtctgttattcaggcttcatagcttgtaaccaaatataaataaaaggcataatttaggtattctatagttgcttagaattttgttaatataaatctctgtgaaaaatcaaggagttttaatattttcagaagtgcatccacctttcagggctttaagttagtattactcaagattatgaacaaatagcacttaggttacctgaaagagttactacaaccccaaagagttgtgttctaagtagtatcttggtaattcagagagatactcatcctacctgaatataaactgagataaatccagtaaagaaagtgtagtaaattctacataagagtctatcattgatttctttttgtggtaaaaatcttagttcatgtgaagaaatttcatgtgaatgttttagctatcaaacagtactgtcacctactcatgcacaaaactgcctcccaaagacttttcccaggtccctcgtatcaaaacattaagagtataatggaagatagcacgatcttgtcagattggacaaacagcaacaaacaaaaaatgaagtatgacttttcctgtgaactctacagaatgtctacatattcaactttccccgccggggtgcctgtctcagaaaggagtcttgctcgtgctggtttttattatactggtgtgaatgacaaggtcaaatgcttctgttgtggcctgatgctggataactggaaactaggagacagtcctattcaaaagcataaacagctatatcctagctgtagctttattcagaatctggtttcagctagtctgggatccacctctaagaatacgtctccaatgagaaacagttttgcacattcattatctcccaccttggaacatagtagcttgttcagtggttcttactccagcctttctccaaaccctcttaattctagagcagttgaagacatctcttcatcgaggactaacccctacagttatgcaatgagtactgaagaagccagatttcttacctaccatatgtggccattaacttttttgtcaccatcagaattggcaagagctggtttttattatataggacctggagatagggtagcctgctttgcctgtggtgggaagctcagtaactgggaaccaaaggatgatgctatgtcagaacaccggaggcattttcccaactgtccatttttggaaaattctctagaaactctgaggtttagcatttcaaatctgagcatgcagacacatgcagctcgaatgagaacatttatgtactggccatctagtgttccagttcagcctgagcagcttgcaagtgctggtttttattatgtgggtcgcaatgatgatgtcaaatgcttttgttgtgatggtggcttgaggtgttgggaatctggagatgatccatgggtagaacatgccaagtggtttccaaggtgtgagttcttgatacgaatgaaaggccaagagtttgttgatgagattcaaggtagatatcctcatcttcttgaacagctgttgtcaacttcagataccactggagaagaaaatgctgacccaccaattattcattttggacctggagaaagttcttcagaagatgctgtcatgatgaatacacctgtggttaaatctgccttggaaatgggctttaatagagacctggtgaaacaaacagttcaaagtaaaatcctgacaactggagagaactataaaacagttaatgatattgtgtcagcacttcttaatgctgaagatgaaaaaagagaagaggagaaggaaaaacaagctgaagaaatggcatcagatgatttgtcattaattcggaagaacagaatggctctctttcaacaattgacatgtgtgcttcctatcctggataatcttttaaaggccaatgtaattaataaacaggaacatgatattattaaacaaaaaacacagatacctttacaagcgagagaactgattgataccattttggttaaaggaaatgctgcggccaacatcttcaaaaactgtctaaaagaaattgactctacattgtataagaacttatttgtggataagaatatgaagtatattccaacagaagatgtttcaggtctgtcactggaagaacaattgaggaggttgcaagaagaacgaacttgtaaagtgtgtatggacaaagaagtttctgttgtatttattccttgtggtcatctggtagtatgccaggaatgtgccccttctctaagaaaatgccctatttgcaggggtataatcaagggtactgttcgtacatttctctcttaaagaaaaatagtctatattttaacctgcataaaaaggtctttaaaatattgttgaacacttgaagccatctaaagtaaaaagggaattatgagtttttcaattagtaacattcatgttctagtctgctttggtactaataatcttgtttctgaaaagatggtatcatatatttaatcttaatctgtttatttacaagggaagatttatgtttggtgaactatattagtatgtatgtgtacctaagggagtagtgtcactgcttgttatgcatcatttcaggagttactggatttgttgttctttcagaaagctttgaatactaaattatagtgtagaaaagaactggaaaccaggaactctggagttcatcagagttatggtgccgaattgtctttggtgcttttcacttgtgttttaaaataaggatttttctcttatttctccccctagtttgtgagaaacatctcaataaagtgctttaaaaagaaaaaaaaaaaaaaaa

SEQ ID NO: 61 - RNA, 2724 nt, Homo sapiens
  source 1..2724: mol_type = mRNA
cccagaaggccgcggggggtggaccgcctaagagggcgtgcgctcccgacatgccccgcggcgcgccattaaccgccagatttgaatcgcgggacccgttggcagaggtggcggcggcggcatgggtgccccgacgttgccccctgcctggcagccctttctcaaggaccaccgcatctctacattcaagaactggcccttcttggagggctgcgcctgcaccccggagcggatggccgaggctggcttcatccactgccccactgagaacgagccagacttggcccagtgtttcttctgcttcaaggagctggaaggctgggagccagatgacgaccccattgggccgggcacggtggcttacgcctgtaataccagcactttgggaggccgaggcgggcggatcacgagagaggaacataaaaagcattcgtccggttgcgctttcctttctgtcaagaagcagtttgaagaattaacccttggtgaatttttgaaactggacagagaaagagccaagaacaaaattgcaaaggaaaccaacaataagaagaaagaatttgaggaaactgcggagaaagtgcgccgtgccatcgagcagctggctgccatggattgaggcctctggccggagctgcctggtcccagagtggctgcaccacttccagggtttattccctggtgccaccagccttcctgtgggccccttagcaatgtcttaggaaaggagatcaacattttcaaattagatgtttcaactgtgctcttgttttgtcttgaaagtggcaccagaggtgcttctgcctgtgcagcgggtgctgctggtaacagtggctgcttctctctctctctctcttttttgggggctcatttttgctgttttgattcccgggcttaccaggtgagaagtgagggaggaagaaggcagtgtcccttttgctagagctgacagctttgttcgcgtgggcagagccttccacagtgaatgtgtctggacctcatgttgttgaggctgtcacagtcctgagtgtggacttggcaggtgcctgttgaatctgagctgcaggttccttatctgtcacacctgtgcctcctcagaggacagtttttttgttgttgtgtttttttgtttttttttttttggtagatgcatgacttgtgtgtgatgagagaatggagacagagtccctggctcctctactgtttaacaacatggctttcttattttgtttgaattgttaattcacagaatagcacaaactacaattaaaactaagcacaaagccattctaagtcattggggaaacggggtgaacttcaggtggatgaggagacagaatagagtgataggaagcgtctggcagatactccttttgccactgctgtgtgattagacaggcccagtgagccgcggggcacatgctggccgctcctccctcagaaaaaggcagtggcctaaatcctttttaaatgacttggctcgatgctgtgggggactggctgggctgctgcaggccgtgtgtctgtcagcccaaccttcacatctgtcacgttctccacacgggggagagacgcagtccgcccaggtccccgctttctttggaggcagcagctcccgcagggctgaagtctggcgtaagatgatggatttgattcgccctcctccctgtcatagagctgcagggtggattgttacagcttcgctggaaacctctggaggtcatctcggctgttcctgagaaataaaaagcctgtcatttcaaacactgctgtggaccctactgggtttttaaaatattgtcagtttttcatcgtcgtccctagcctgccaacagccatctgcccagacagccgcagtgaggatgagcgtcctggcagagacgcagttgtctctgggcgcttgccagagccacgaaccccagacctgtttgtatcatccgggctccttccgggcagaaacaactgaaaatgcacttcagacccacttatttctgccacatctgagtcggcctgagatagacttttccctctaaactgggagaatatcacagtggtttttgttagcagaaaatgcactccagcctctgtactcatctaagctgcttatttttgatatttgtgtcagtctgtaaatggatacttcactttaataactgttgcttagtaattggctttgtagagaagctggaaaaaaatggttttgtcttcaactcctttgcatgccaggcggtgatgtggatctcggcttctgtgagcctgtgctgtgggcagggctgagctggagccgcccctctcagcccgcctgccacggcctttccttaaaggccatccttaaaaccagaccctcatggctaccagcacctgaaagcttcctcgacatctgttaataaagccgtaggcccttgtctaagtgcaaccgcctagactttctttcagatacatgtccacatgtccatttttcaggttctctaagttggagtggagtctgggaagggttgtgaatgaggcttctgggctatgggtgaggttccaatggcaggttagagcccctcgggccaactgccatcctggaaagtagagacagcagtgcccgctgcccagaagagaccagcaagccaaactggagcccccattgcaggctgtcgccatgtggaaagagtaactcacaattgccaataaagtctcatgtggttttatctaaaaaaaaaaaaaaaaaaaaaaaaa

SEQ ID NO: 62 - RNA, 1319 nt, Homo sapiens
  source 1..1319: mol_type = mRNA
gctgcagaggattcctgcagaggatcaagacagcacgtggacctcgcacagcctctcccacaggtaccatgaaggtctccgcggcagccctcgctgtcatcctcattgctactgccctctgcgctcctgcatctgcctccccatattcctcggacaccacaccctgctgctttgcctacattgcccgcccactgccccgtgcccacatcaaggagtatttctacaccagtggcaagtgctccaacccagcagtcgtccacaggtcaaggatgccaaagagagagggacagcaagtctggcaggatttcctgtatgactcccggctgaacaagggcaagctttgtcacccgaaagaaccgccaagtgtgtgccaacccagagaagaaatgggttcgggagtacatcaactctttggagatgagctaggatggagagtccttgaacctgaacttacacaaatttgcctgtttctgcttgctcttgtcctagcttgggaggcttcccctcactatcctaccccacccgctccttgaagggcccagattctaccacacagcagcagttacaaaaaccttccccaggctggacgtggtggctcacgcctgtaatcccagcactttgggaggccaaggtgggtggatcacttgaggtcaggagttcgagaccagcctggccaacatgatgaaaccccatctctactaaaaatacaaaaaattagccgggcgtggtagcgggcgcctgtagtcccagctactcgggaggctgaggcaggagaatggcgtgaacccgggaggcggagcttgcagtgagccgagatcgcgccactgcactccagcctgggcgacagagcgagactccgtctcaaaaaaaaaaaaaaaaaaaaaaatacaaaaattagccgggcgtggtggcccacgcctgtaatcccagctactcgggaggctaaggcaggaaaattgtttgaacccaggaggtggaggctgcagtgagctgagattgtgccacttcactccagcctgggtgacaaagtgagactccgtcacaacaacaacaacaaaaagcttccccaactaaagcctagaagagcttctgaggcgctgctttgtcaaaaggaagtctctaggttctgagctctggctttgccttggctttgccagggctctgtgaccaggaaggaagtcagcatgcctctagaggcaaggaggggaggaacactgcactcttaagcttccgccgtctcaacccctcacaggagcttactggcaaacatgaaaaatcggcttaccattaaagttctcaatgcaaccataaaaaaaaaa

SEQ ID NO: 63 - RNA, 4304 nt, Homo sapiens
  source 1..4304: mol_type = mRNA
cacacggactacaggggagttttgttgaagttgcaaagtcctggagcctccagagggctgtcggcgcagtagcagcgagcagcagagtccgcacgctccggcgaggggcagaagagcgcgagggagcgcggggcagcagaagcgagagccgagcgcggacccagccaggacccacagccctccccagctgcccaggaagagccccagccatggaacaccagctcctgtgctgcgaagtggaaaccatccgccgcgcgtaccccgatgccaacctcctcaacgaccgggtgctgcgggccatgctgaaggcggaggagacctgcgcgccctcggtgtcctacttcaaatgtgtgcagaaggaggtcctgccgtccatgcggaagatcgtcgccacctggatgctggaggtctgcgaggaacagaagtgcgaggaggaggtcttcccgctggccatgaactacctggaccgcttcctgtcgctggagcccgtgaaaaagagccgcctgcagctgctgggggccacttgcatgttcgtggcctctaagatgaaggagaccatccccctgacggccgagaagctgtgcatctacaccgacaactccatccggcccgaggagctgctgcaaatggagctgctcctggtgaacaagctcaagtggaacctggccgcaatgaccccgcacgatttcattgaacacttcctctccaaaatgccagaggcggaggagaacaaacagatcatccgcaaacacgcgcagaccttcgttgccctctgtgccacagatgtgaagttcatttccaatccgccctccatggtggcagcggggagcgtggtggccgcagtgcaaggcctgaacctgaggagccccaacaacttcctgtcctactaccgcctcacacgcttcctctccagagtgatcaagtgtgacccggactgcctccgggcctgccaggagcagatcgaagccctgctggagtcaagcctgcgccaggcccagcagaacatggaccccaaggccgccgaggaggaggaagaggaggaggaggaggtggacctggcttgcacacccaccgacgtgcgggacgtggacatctgagggcgccaggcaggcgggcgccaccgccacccgcagcgagggcggagccggccccaggtgctcccctgacagtccctcctctccggagcattttgataccagaagggaaagcttcattctccttgttgttggttgttttttcctttgctctttcccccttccatctctgacttaagcaaaagaaaaagattacccaaaaactgtctttaaaagagagagagagaaaaaaaaaatagtatttgcataaccctgagcggtgggggaggagggttgtgctacagatgatagaggattttataccccaataatcaactcgtttttatattaatgtacttgtttctctgttgtaagaataggcattaacacaaaggaggcgtctcgggagaggattaggttccatcctttacgtgtttaaaaaaaagcataaaaacattttaaaaacatagaaaaattcagcaaaccatttttaaagtagaagagggttttaggtagaaaaacatattcttgtgcttttcctgataaagcacagctgtagtggggttctaggcatctctgtactttgcttgctcatatgcatgtagtcactttataagtcattgtatgttattatattccgtaggtagatgtgtaacctcttcaccttattcatggctgaagtcacctcttggttacagtagcgtagcgtgcccgtgtgcatgtcctttgcgcctgtgaccaccaccccaacaaaccatccagtgacaaaccatccagtggaggtttgtcgggcaccagccagcgtagcagggtcgggaaaggccacctgtcccactcctacgatacgctactataaagagaagacgaaatagtgacataatatattctatttttatactcttcctatttttgtagtgacctgtttatgagatgctggttttctacccaacggccctgcagccagctcacgtccaggttcaacccacagctacttggtttgtgttcttcttcatattctaaaaccattccatttccaagcactttcagtccaataggtgtaggaaatagcgctgtttttgttgtgtgtgcagggagggcagttttctaatggaatggtttgggaatatccatgtacttgtttgcaagcaggactttgaggcaagtgtgggccactgtggtggcagtggaggtggggtgtttgggaggctgcgtgccagtcaagaagaaaaaggtttgcattctcacattgccaggatgataagttcctttccttttctttaaagaagttgaagtttaggaatcctttggtgccaactggtgtttgaaagtagggacctcagaggtttacctagagaacaggtggtttttaagggttatcttagatgtttcacaccggaaggtttttaaacactaaaatatataatttatagttaaggctaaaaagtatatttattgcagaggatgttcataaggccagtatgatttataaatgcaatctccccttgatttaaacacacagatacacacacacacacacacacacacaaaccttctgcctttgatgttacagatttaatacagtttatttttaaagatagatccttttataggtgagaaaaaaacaatctggaagaaaaaaaccacacaaagacattgattcagcctgtttggcgtttcccagagtcatctgattggacaggcatgggtgcaaggaaaattagggtactcaacctaagttcggttccgatgaattcttatcccctgccccttcctttaaaaaacttagtgacaaaatagacaatttgcacatcttggctatgtaattcttgtaatttttatttaggaagtgttgaagggaggtggcaagagtgtggaggctgacgtgtgagggaggacaggcgggaggaggtgtgaggaggaggctcccgaggggaaggggcggtgcccacaccggggacaggccgcagctccattttcttattgcgctgctaccgttgacttccaggcacggtttggaaatattcacatcgcttctgtgtatctctttcacattgtttgctgctattggaggatcagttttttgttttacaatgtcatatactgccatgtactagttttagttttctcttagaacattgtattacagatgccttttttgtagttttttttttttttatgtgatcaattttgacttaatgtgattactgctctattccaaaaaggttgctgtttcacaatacctcatgcttcacttagccatggtggacccagcgggcaggttctgcctgctttggcgggcagacacgcgggcgcgatcccacacaggctggcgggggccggccccgaggccgcgtgcgtgagaaccgcgccggtgtccccagagaccaggctgtgtccctcttctcttccctgcgcctgtgatgctgggcacttcatctgatcgggggcgtagcatcatagtagtttttacagctgtgttattctttgcgtgtagctatggaagttgcataattattattattattattataacaagtgtgtcttacgtgccaccacggcgttgtacctgtaggactctcattcgggatgattggaatagcttctggaatttgttcaagttttgggtatgtttaatctgttatgtactagtgttctgtttgttattgttttgttaattacaccataatgctaatttaaagagactccaaatctcaatgaagccagctcacagtgctgtgtgccccggtcacctagcaagctgccgaaccaaaagaatttgcaccccgctgcgggcccacgtggttggggccctgccctggcagggtcatcctgtgctcggaggccatctcgggcacaggcccaccccgccccacccctccagaacacggctcacgcttacctcaaccatcctggctgcggcgtctgtctgaaccacgcgggggccttgagggacgctttgtctgtcgtgatggggcaagggcacaagtcctggatgttgtgtgtatcgagaggccaaaggctggtggcaagtgcacggggcacagcggagtctgtcctgtgacgcgcaagtctgagggtctgggcggcgggcggctgggtctgtgcatttctggttgcaccgcggcgcttcccagcaccaacatgtaaccggcatgtttccagcagaagacaaaaagacaaacatgaaagtctagaaataaaactggtaaaaccccaaaaaaaaaaaaaaaa

SEQ ID NO: 64 - RNA, 6531 nt, Homo sapiens
  source 1..6531: mol_type = mRNA
gcccagccagcttgcgtcaccgcttcagagcggagaagagcgagcaggggagagcgagaccagttttaaggggaggaccggtgcgagtgaggcagccccgaggctctgctcgcccaccacccaatcctcgcctcccttctgctccaccttctctctctgccctcacctctcccccgaaaaccccctatttagccaaaggaaggaggtcaggggaacgctctcccctccccttccaaaaaacaaaaacagaaaaacccttttccaggccggggaaagcaggagggagaggggccgccgggctggccatggagctgctgtgccacgaggtggacccggtccgcagggccgtgcgggaccgcaacctgctccgagacgaccgcgtcctgcagaacctgctcaccatcgaggagcgctaccttccgcagtgctcctacttcaagtgcgtgcagaaggacatccaaccctacatgcgcagaatggtggccacctggatgctggaggtctgtgaggaacagaagtgcgaagaagaggtcttccctctggccatgaattacctggaccgtttcttggctggggtcccgactccgaagtcccatctgcaactcctgggtgctgtctgcatgttcctggcctccaaactcaaagagaccagcccgctgaccgcggagaagctgtgcatttacaccgacaactccatcaagcctcaggagctgctggagtgggaactggtggtgctggggaagttgaagtggaacctggcagctgtcactcctcatgacttcattgagcacatcttgcgcaagctgccccagcagcgggagaagctgtctctgatccgcaagcatgctcagaccttcattgctctgtgtgccaccgactttaagtttgccatgtacccaccgtcgatgatcgcaactggaagtgtgggagcagccatctgtgggctccagcaggatgaggaagtgagctcgctcacttgtgatgccctgactgagctgctggctaagatcaccaacacagacgtggattgtctcaaagcttgccaggagcagattgaggcggtgctcctcaatagcctgcagcagtaccgtcaggaccaacgtgacggatccaagtcggaggatgaactggaccaagccagcacccctacagacgtgcgggatatcgacctgtgaggatgccagttgggccgaaagagagagacgcgtccataatctggtctcttcttctttctggttgtttttgttctttgtgttttagggtgaaacttaaaaaaaaaattctgcccccacctagatcatatttaaagatcttttagaagtgagagaaaaaggtcctacgaaaacggaataataaaaagcatttggtgcctatttgaagtacagcataagggaatcccttgtatatgcgaacagttattgtttgattatgtaaaagtaatagtaaaatgcttacaggaaaacctgcagagtagttagagaatatgtatgcctgcaatatgggaacaaattagaggagacttttttttttcatgttatgagctagcacatacacccccttgtagtataatttcaaggaactgtgtacgccatttatggcatgattagattgcaaagcaatgaactcaagaaggaattgaaataaggagggacatgatggggaaggagtacaaaacaatctctcaacatgattgaaccatttgggatggagaagcacctttgctctcagccacctgttactaagtcaggagtgtagttggatctctacattaatgtcctcttgctgtctacagtagctgctacctaaaaaaagatgttttattttgccagttggacacaggtgattggctcctgggtttcatgttctgtgacatcctgcttcttcttccaaatgcagttcattgcagacaccaccatattgctatctaatggggaaatgtagctatgggccataaccaaaactcacatgaaacggaggcagatggagaccaagggtgggatccagaatggagtcttttctgttattgtatttaaaagggtaatgtggccttggcatttcttcttagaaaaaaactaatttttggtgctgattggcatgtctggttcacagtttagcattgttataaaccattccattcgaaaagcactttgaaaaattgttcccgagcgatagatgggatggtttatgcaagtcatgctgaatactcctcccctcttctcttttgccccctcccttcctgcccccagtctgggttactcttcgcttctggtatctggcgttctttggtacacagttctggtgttcctaccaggactcaagagacaccccttcctgctgacattcccatcacaacattcctcagacaagcctgtaaactaaaatctgttaccattctgatggcacagaaggatcttaattcccatctctatacttctcctttggacatggaaagaaaagttattgctggtgcaaagatagatggctgaacatcagggtgtggcattttgttcccttttccgtttttttttttttattgttgttgttaattttattgcaaagttgtattcagcgtacttgaatttttcttcctctccacttcttagaggcattcagttagcaaagaggttggagcaacaacttttttttttttttttgcacaattgtaattgacaggtaatgaagctatttgttaaaatatttgcctttttaagtaaaaaagaaaaatcagaacagggctatttgaagaattattttatacacagattctgccttgtttcatagtatgagggttgaagacggaaaacaatctaagggtctctcatttttttaattttgttttgttcagtttggtttttttttttttttgcgctgctaagaagctaaagtcatccatccttattcacgttgacagtacctagctgtaatgtttcacagagtgtgctgctattttataaacatttttataatatattattttactgcttaaattccaagtcctgaagtagatggttgagatatgagttcttcgtactggaaaagcccttccgtagtttgttttcttctggtagcatattcatggttgtttttttttttcttttttggttttttggttttttttttttcctctgatcacattcttcaaagacggagtattctttacctcaggtttactggacaaaatcaataactacaaaaggcaatgattcacgcttttgttttcataatacctcacaaccgtacagtttctgcttgggagcccattcgcatgaggaatacagaagcagtgtgagcagggctgactccctctcaggtggaaggcagggcggtctcactcccagggacctttttggtcatggaggccatcgggctcccagttagaccctggtatcctcatcatgatggaaaaaatacattgaaccaagggatcctccctccccttcaaggcagacgttcagtacaaacatttatgcggtaggctcagatgtcgtaatttgcacttaggtaccaggtgtcaggaaacagactaaaaagaattccaccaggctgtttggagatcctcatcttggagctttttcaaaagcggggcttcatctgcaaagggccctttcatcttgaagtttttcccctccgtctttcccctcccctggcatggacaccttgtgtttaggatcatctctgcaggtttcctaggtctgaatctgcgagtagatgaacctgcagcaagcagcgtttatggtgcttccttctccctcctctgtctcaaactgcgcaggcaagcactatgcaagcccaggccctctgctgagcggtactaaacggtcgggttttcaatcacactgaattggcaggataagaaaaataggtcagataagtatgggatgatagttgaagggaggtgaagaggctgcttctctacagaggtgaaattccagatgagtcagtctcttgggaagtgtgtttagaagggttcaggactttgtgagttagcatgaccctaaaattctaggggatttctggtgggacaatgggtggtgaattctgaagttttggagagggaagtggagcagccagcaagtaagctagccagagttttctcaagagccagctttgctcagcacactctcctgggccccaaggagtcccacggaatggggaaagcgggaaccctggagttcttgggaatcttggagcctaaagagaaaccgaggtgcaaattcatttcatggtgactgacccttgagcttaaacagaagcagcaaatgaaagaaccggacaaataaggaagggcacaagcctacccgactctatttacagtctgtaactttccactcttcctgtagtcccgaggcccctgggtccttctagcttttctctttcccatccttggggccttgtgtgatgatgggtgtggggctgccgatgggaaagtcgggggttgttaggcttttctgcctgctcctgcttaaacacaagaaggaatcctggattttgccctctccttagctcttagtctctttggtaggagttttgttccagaggagctctcccccttggatttgaacttgctctttttgttgttgttgttctttctcttctttttcttacctcccactaaaggggttccaaattatcctggtctttttctaccttgttgtgtttctatctcgtctttacttccatctgtttgtttttttctccatcagtgggggccgagttgttcccccagcctgccaaattttgatccttcccctcttttggccaaatcctagggggaagaaatcctagtatgccaaaaatatatgctaagcataattaaactccatgcgggtccataacagccaagaagcctgcaggagaaagccaagggcagttccctccgcagaacaccccatgcgtgctgagaggcgagctccttgaagaaggggctgttcttccaggaggccttattttgaactgcctcaggaccccactggagagcacagcatgccttactactgggtcatccttggtctatgtgctctgtactggaggctctgttctgcctcttatcagccaggtcaggggcacacatggcttaagtgacaaagccagaggagaagacaaccctgacagcatcacgctgcatcccattgctagcaggattggcaactcttcagacggagctgcgcttccctgcagtctagcacctctagggcctctccagactgtgccctgggagctctgggactgaaaggttaagaacataaggcaggatcagatgactctctccaagagggcaggggaattttctctccatgggccacaggggacagggctgggagaagaaatagacttgcaccttatgtcatgtaaataattgattttctagttcaagaagataatattggtagtgtgggaattggaggtaggaaggggaggaagtctgagtaagccagttggcttctaagccaaaaggattcctctttgtttatctctgagacagtccaaccttgagaatagctttaaaagggaaattaatgctgagatgataaagtccccttaagccaacaaaccctctgtagctatagaatgagtgcaggtttctattggtgtggactcagagcaatttacaagagctgttcatgcagccatccatttgtgcaaaatagggtaagaagattcaagaggatatttattacttcctcataccacatggcttttgatgattctggattctaaacaacccagaatggtcatttcaggcacaacgatactacattcgtgtgtgtctgcttttaaacttggctgggctatcagaccctattctcggctcaggttttgagaagccatcagcaaatgtgtacgtgcatgctgtagctgcagcctgcatcccttcgcctgcagcctactttggggaaataaagtgccttactgactgtagccattacagtatccaatgtcttttgacaggtgcctgtccttgaaaaacaaagtttctatttttatttttaattggtttagttcttaactgctggccaactcttacatccccagcaaatcatcgggccattggattttttccattatgttcatcacccttatatcatgtacctcagatctctctctctctcctctctctcagttatgtagtttcttgtcttggacttttttttttcttttctttttctttttttttttgctttaaaacaagtgtgatgccatatcaagtccatgttattctctcacagtgtactctataagaggtgtgggtgtctgtttggtcaggatgttagaaagtgctgataagtagcatgatcagtgtatgcgaaaaggtttttaggaagtatggcaaaaatgttgtattggctatgatggtgacatgatatagtcagctgccttttaagaggtcttatctgttcagtgttaagtgatttaaaaaaataataacctgttttctgactagtttaaagatggatttgaaaatggttttgaatgcaattaggttatgctatttggacaataaactcaccttgacctaaattaaaaaaaaaa

SEQ ID NO: 65 - RNA, 4815 nt, Homo sapiens
  source 1..4815: mol_type = mRNA
agtggcgtcggaactgcaaagcacctgtgagcttgcggaagtcagttcagactccagcccgctccagcccggcccgacccgaccgcacccggcgcctgccctcgctcggcgtccccggccagccatgggcccttggagccgcagcctctcggcgctgctgctgctgctgcaggtctcctcttggctctgccaggagccggagccctgccaccctggctttgacgccgagagctacacgttcacggtgccccggcgccacctggagagaggccgcgtcctgggcagagtgaattttgaagattgcaccggtcgacaaaggacagcctatttttccctcgacacccgattcaaagtgggcacagatggtgtgattacagtcaaaaggcctctacggtttcataacccacagatccatttcttggtctacgcctgggactccacctacagaaagttttccaccaaagtcacgctgaatacagtggggcaccaccaccgccccccgccccatcaggcctccgtttctggaatccaagcagaattgctcacatttcccaactcctctcctggcctcagaagacagaagagagactgggttattcctcccatcagctgcccagaaaatgaaaaaggcccatttcctaaaaacctggttcagatcaaatccaacaaagacaaagaaggcaaggttttctacagcatcactggccaaggagctgacacaccccctgttggtgtctttattattgaaagagaaacaggatggctgaaggtgacagagcctctggatagagaacgcattgccacatacactctcttctctcacgctgtgtcatccaacgggaatgcagttgaggatccaatggagattttgatcacggtaaccgatcagaatgacaacaagcccgaattcacccaggaggtctttaaggggtctgtcatggaaggtgctcttccaggaacctctgtgatggaggtcacagccacagacgcggacgatgatgtgaacacctacaatgccgccatcgcttacaccatcctcagccaagatcctgagctccctgacaaaaatatgttcaccattaacaggaacacaggagtcatcagtgtggtcaccactgggctggaccgagagagtttccctacgtataccctggtggttcaagctgctgaccttcaaggtgaggggttaagcacaacagcaacagctgtgatcacagtcactgacaccaacgataatcctccgatcttcaatcccaccacgtacaagggtcaggtgcctgagaacgaggctaacgtcgtaatcaccacactgaaagtgactgatgctgatgcccccaataccccagcgtgggaggctgtatacaccatattgaatgatgatggtggacaatttgtcgtcaccacaaatccagtgaacaacgatggcattttgaaaacagcaaagggcttggattttgaggccaagcagcagtacattctacacgtagcagtgacgaatgtggtaccttttgaggtctctctcaccacctccacagccaccgtcaccgtggatgtgctggatgtgaatgaagcccccatctttgtgcctcctgaaaagagagtggaagtgtccgaggactttggcgtgggccaggaaatcacatcctacactgcccaggagccagacacatttatggaacagaaaataacatatcggatttggagagacactgccaactggctggagattaatccggacactggtgccatttccactcgggctgagctggacagggaggattttgagcacgtgaagaacagcacgtacacagccctaatcatagctacagacaatggttctccagttgctactggaacagggacacttctgctgatcctgtctgatgtgaatgacaacgcccccataccagaacctcgaactatattcttctgtgagaggaatccaaagcctcaggtcataaacatcattgatgcagaccttcctcccaatacatctcccttcacagcagaactaacacacggggcgagtgccaactggaccattcagtacaacgacccaacccaagaatctatcattttgaagccaaagatggccttagaggtgggtgactacaaaatcaatctcaagctcatggataaccagaataaagaccaagtgaccaccttagaggtcagcgtgtgtgactgtgaaggggccgctggcgtctgtaggaaggcacagcctgtcgaagcaggattgcaaattcctgccattctggggattcttggaggaattcttgctttgctaattctgattctgctgctcttgctgtttcttcggaggagagcggtggtcaaagagcccttactgcccccagaggatgacacccgggacaacgtttattactatgatgaagaaggaggcggagaagaggaccaggactttgacttgagccagctgcacaggggcctggacgctcggcctgaagtgactcgtaacgacgttgcaccaaccctcatgagtgtcccccggtatcttccccgccctgccaatcccgatgaaattggaaattttattgatgaaaatctgaaagcggctgatactgaccccacagccccgccttatgattctctgctcgtgtttgactatgaaggaagcggttccgaagctgctagtctgagctccctgaactcctcagagtcagacaaagaccaggactatgactacttgaacgaatggggcaatcgcttcaagaagctggctgacatgtacggaggcggcgaggacgactaggggactcgagagaggcgggccccagacccatgtgctgggaaatgcagaaatcacgttgctggtggtttttcagctcccttcccttgagatgagtttctggggaaaaaaaagagactggttagtgatgcagttagtatagctttatactctctccactttatagctctaataagtttgtgttagaaaagtttcgacttatttcttaaagcttttttttttttcccatcactctttacatggtggtgatgtccaaaagatacccaaattttaatattccagaagaacaactttagcatcagaaggttcacccagcaccttgcagattttcttaaggaattttgtctcacttttaaaaagaaggggagaagtcagctactctagttctgttgttttgtgtatataattttttaaaaaaaatttgtgtgcttctgctcattactacactggtgtgtccctctgccttttttttttttttaagacagggtctcattctatcggccaggctggagtgcagtggtgcaatcacagctcactgcagccttgtcctcccaggctcaagctatccttgcacctcagcctcccaagtagctgggaccacaggcatgcaccactacgcatgactaattttttaaatatttgagacggggtctccctgtgttacccaggctggtctcaaactcctgggctcaagtgatcctcccatcttggcctcccagagtattgggattacagacatgagccactgcacctgcccagctccccaactccctgccattttttaagagacagtttcgctccatcgcccaggcctgggatgcagtgatgtgatcatagctcactgtaacctcaaactctggggctcaagcagttctcccaccagcctcctttttatttttttgtacagatggggtcttgctatgttgcccaagctggtcttaaactcctggcctcaagcaatccttctgccttggccccccaaagtgctgggattgtgggcatgagctgctgtgcccagcctccatgttttaatatcaactctcactcctgaattcagttgctttgcccaagataggagttctctgatgcagaaattattgggctcttttagggtaagaagtttgtgtctttgtctggccacatcttgactaggtattgtctactctgaagacctttaatggcttccctctttcatctcctgagtatgtaacttgcaatgggcagctatccagtgacttgttctgagtaagtgtgttcattaatgtttatttagctctgaagcaagagtgatatactccaggacttagaatagtgcctaaagtgctgcagccaaagacagagcggaactatgaaaagtgggcttggagatggcaggagagcttgtcattgagcctggcaatttagcaaactgatgctgaggatgattgaggtgggtctacctcatctctgaaaattctggaaggaatggaggagtctcaacatgtgtttctgacacaagatccgtggtttgtactcaaagcccagaatccccaagtgcctgcttttgatgatgtctacagaaaatgctggctgagctgaacacatttgcccaattccaggtgtgcacagaaaaccgagaatattcaaaattccaaatttttttcttaggagcaagaagaaaatgtggccctaaagggggttagttgaggggtagggggtagtgaggatcttgatttggatctctttttatttaaatgtgaatttcaacttttgacaatcaaagaaaagacttttgttgaaatagctttactgtttctcaagtgttttggagaaaaaaatcaaccctgcaatcactttttggaattgtcttgatttttcggcagttcaagctatatcgaatatagttctgtgtagagaatgtcactgtagttttgagtgtatacatgtgtgggtgctgataattgtgtattttctttgggggtggaaaaggaaaacaattcaagctgagaaaagtattctcaaagatgcatttttataaattttattaaacaattttgttaaaccat

SEQ ID NO: 66 - RNA, 4134 nt, Homo sapiens
  source 1..4134: mol_type = mRNA
aacagtccaaagaagcaaatgggatgccacctccgcggggctcgctcctcgcgaggtgctcaccccgtatctgccatgcaaaacgagggagcgttaggaaggaatccgtcttgtaaagccattggtcctggtcatcagcctctacccaatgctttcgtgatgctgctgctgatctatttgggaagttggctggctggcgaggcagagcctctcctcaaagcctggctcccacggaaaatatgctcagtgcagccgcgtgcatgaatgaaaacgccgccgggcgcttctagtcggacaaaatgcagccgagaactccgctcgttctgtgcgttctcctgtcccagggccaaacaacccacctgcactgcatggttcccccagcaagaacatcccagtgagaatggcccacagatgcctgggcgtgacccacctgcagcttcaaccatgcaggtgctgctgctaacatctgcagaagatttggactgcactcctggatttcagcagaaagtgttccatatcaatcagccagctgaattcattgaggaccagtcaattctaaacttgaccttcagtgactgtaagggaaacgacaagctacgctatgaggtctcgagcccatacttcaaggtgaacagcgatggcggcttagttgctctgagaaacataactgcagtgggcaaaactctgttcgtccatgcacggaccccccatgcggaagatatggcagaactcgtgattgtcggggggaaagacatccagggctccttgcaggatatatttaaatttgcaagaacttctcctgtcccaagacaaaagaggtccattgtggtatctcccattttaattccagagaatcagagacagcctttcccaagagatgttggcaaggtagtcgatagtgacaggccagaaaggtccaagttccggctcactggaaagggagtggatcaagagcctaaaggaattttcagaatcaatgagaacacagggagcgtctccgtgacacggaccttggacagagaagtaatcgctgtttatcaactatttgtggagaccactgatgtcaatggcaaaactctcgaggggccggtgcctctggaagtcattgtgattgatcagaatgacaaccgaccgatctttcgggaaggcccctacatcggccacgtcatggaagggtcacccacaggcaccacagtgatgcggatgacagcctttgatgcagatgacccagccaccgataatgccctcctgcggtataatatccgtcagcagacgcctgacaagccatctcccaacatgttctacatcgatcctgagaaaggagacattgtcactgttgtgtcacctgcgctgctggaccgagagactctggaaaatcccaagtatgaactgatcatcgaggctcaagatatggctggactggatgttggattaacaggcacggccacagccacgatcatgatcgatgacaaaaatgatcactcaccaaaattcaccaagaaagagtttcaagccacagtcgaggaaggagctgtgggagttattgtcaatttgacagttgaagataaggatgaccccaccacaggtgcatggagggctgcctacaccatcatcaacggaaaccccgggcagagctttgaaatccacaccaaccctcaaaccaacgaagggatgctttctgttgtcaaaccattggactatgaaatttctgccttccacaccctgctgatcaaagtggaaaatgaagacccactcgtacccgacgtctcctacggccccagctccacagccaccgtccacatcactgtcctggatgtcaacgagggcccagtcttctacccagaccccatgatggtgaccaggcaggaggacctctctgtgggcagcgtgctgctgacagtgaatgccacggaccccgactccctgcagcatcaaaccatcaggtattctgtttacaaggacccagcaggttggctgaatattaaccccatcaatgggactgttgacaccacagctgtgctggaccgtgagtccccatttgtcgacaacagcgtgtacactgctctcttcctggcaattgacagtggcaaccctcccgctacgggcactgggactttgctgataaccctggaggacgtgaatgacaatgccccgttcatttaccccacagtagctgaagtctgtgatgatgccaaaaacctcagtgtagtcattttgggagcatcagataaggatcttcacccgaatacagatcctttcaaatttgaaatccacaaacaagctgttcctgataaagtctggaagatctccaagatcaacaatacacacgccctggtaagccttcttcaaaatctgaacaaagcaaactacaacctgcccatcatggtgacagattcagggaaaccacccatgacgaatatcacagatctcagggtacaagtgtgctcctgcaggaattccaaagtggactgcaacgcggcaggggccctgcgcttcagcctgccctcagtcctgctcctcagcctcttcagcttagcttgtctgtgagaactcctgacgtctgaagcttgactcccaagtttccatagcaacaggaaaaaaaaaaatctatccaaatctgaagattgcggtttacagctatcgaacttcacaactaggcctcaattgttccggttttttattttctttacaatttcacttagtctgtacttcatcattttgacagcatcttcctccctcctttaattaatggaatcttctgaattttccctgaatgtttaaagatcatgacatatgacttgatcttctgggagcaggaacaatgactactttttctggtgtgttaacatgtcgctagccagtgctccaggcacccagctttgtctgtgggttagtattggtgtatgtatgagtatctgtatgtatatatacacggtatttatagagagagactatcctggagaagcctcgttttgatgccattcttccttgcaaggttaagcaaggtgggtggaaactaagacacctgaaccctccagggcctcccgcatcaaggtcagcatgaggacagaccacagagctgtcacttttgctccgaagctacttctccactgtcccgttcagtctgaatgctgccacaaccagccaggcaggtccacagagagggagagcagagaaagaagtcctttctctttattgagttcgaggactacaaccaatttacactgccatctgatgccgtgatcctgagccaaggaggtgaggagcagagcaggcaatttcaccaccaaatgccaagaaaagggctgacattttctttcatgggcaccaacctgcatttgtatgtgtcccgaatccacagtcgtactgattctaatggggacacagatcatggtagagaatctctccctcctcagtaaatgtacaactgcacctgtcatcatggaggtcatacatgcatacaaagaggtgtacaggtaccatcttgtatacacatatatacccacatgtacagacatacatttatgcacattcacgctgtttgtttcatatatacaggcataaaatagagtaaatacaggtagttttaaaagtacccttttgtgtgaattgactaccgttgtttgcaaacccgaaaataaaagacgttcattatgtatgaaaagtaactgatttgtattctgtgagcatgtaaaagcggaaagttagtgcttgttctaagattaccttcttgttgataaaccataaatgaatcatcaaagctcacaccaaatttttctatcaaataaaactagtgacagcttgtggctttttattagagctcgccacgaactagggtaaggtgagtgtcttagcatattttaatgcagttgcttactaaaggttttaaccgcacatgcacacacacacgctttcttatgcaatctatgtttgcacttgtgctttcagttagccttctgtaggaagtagaagtcatatgttgtctttgttgtagtgaaattatacagatagagttccatatattgtatttgtttcaatggtaaatccttttggaacatatagaatgcagagatttttttttccattaaaataaatgggtattggtggttaaaactgctggacagtaaaaaaaaa

SEQ ID NO: 67 - RNA, 2284 nt, Homo sapiens
  source 1..2284: mol_type = mRNA
agctgaggtgtgagcagctgccgaagtcagttccttgtggagccggagctgggcgcggattcgccgaggcaccgaggcactcagaggaggtgagagagcggcggcagacaacaggggaccccgggccggcggcccagagccgagccaagcgtgcccgcgtgtgtccctgcgtgtccgcgaggatgcgtgttcgcgggtgtgtgctgcgttcacaggtgtttctgcggcaggcgccatgtcagaaccggctggggatgtccgtcagaacccatgcggcagcaaggcctgccgccgcctcttcggcccagtggacagcgagcagctgagccgcgactgtgatgcgctaatggcgggctgcatccaggaggcccgtgagcgatggaacttcgactttgtcaccgagacaccactggagggtgacttcgcctgggagcgtgtgcggggccttggcctgcccaagctctaccttcccacggggccccggcgaggccgggatgagttgggaggaggcaggcggcctggcacctcacctgctctgctgcaggggacagcagaggaagaccatgtggacctgtcactgtcttgtacccttgtgcctcgctcaggggagcaggctgaagggtccccaggtggacctggagactctcagggtcgaaaacggcggcagaccagcatgacagatttctaccactccaaacgccggctgatcttctccaagaggaagccctaatccgcccacaggaagcctgcagtcctggaagcgcgagggcctcaaaggcccgctctacatcttctgccttagtctcagtttgtgtgtcttaattattatttgtgttttaatttaaacacctcctcatgtacataccctggccgccccctgccccccagcctctggcattagaattatttaaacaaaaactaggcggttgaatgagaggttcctaagagtgctgggcatttttattttatgaaatactatttaaagcctcctcatcccgtgttctccttttcctctctcccggaggttgggtgggccggcttcatgccagctacttcctcctccccacttgtccgctgggtggtaccctctggaggggtgtggctccttcccatcgctgtcacaggcggttatgaaattcaccccctttcctggacactcagacctgaattctttttcatttgagaagtaaacagatggcactttgaaggggcctcaccgagtgggggcatcatcaaaaactttggagtcccctcacctcctctaaggttgggcagggtgaccctgaagtgagcacagcctagggctgagctggggacctggtaccctcctggctcttgatacccccctctgtcttgtgaaggcagggggaaggtggggtcctggagcagaccaccccgcctgccctcatggcccctctgacctgcactggggagcccgtctcagtgttgagccttttccctctttggctcccctgtaccttttgaggagccccagctacccttcttctccagctgggctctgcaattcccctctgctgctgtccctcccccttgtcctttcccttcagtaccctctcagctccaggtggctctgaggtgcctgtcccacccccacccccagctcaatggactggaaggggaagggacacacaagaagaagggcaccctagttctacctcaggcagctcaagcagcgaccgccccctcctctagctgtgggggtgagggtcccatgtggtggcacaggcccccttgagtggggttatctctgtgttaggggtatatgatgggggagtagatctttctaggagggagacactggcccctcaaatcgtccagcgaccttcctcatccaccccatccctccccagttcattgcactttgattagcagcggaacaaggagtcagacattttaagatggtggcagtagaggctatggacagggcatgccacgtgggctcatatggggctgggagtagttgtctttcctggcactaacgttgagcccctggaggcactgaagtgcttagtgtacttggagtattggggtctgaccccaaacaccttccagctcctgtaacatactggcctggactgttttctctcggctccccatgtgtcctggttcccgtttctccacctagactgtaaacctctcgagggcagggaccacaccctgtactgttctgtgtctttcacagctcctcccacaatgctgaatatacagcaggtgctcaataaatgattcttagtgactttacttgtaaaaaaaaaaaaaaaaa

SEQ ID NO: 68 - RNA, 2413 nt, Homo sapiens
  source 1..2413: mol_type = mRNA
cttcttcgtcagcctcccttccaccgccatattgggccactaaaaaaagggggctcgtcttttcggggtgtttttctccccctcccctgtccccgcttgctcacggctctgcgactccgacgccggcaaggtttggagagcggctgggttcgcgggacccgcgggcttgcacccgcccagactcggacgggctttgccaccctctccgcttgcctggtcccctctcctctccgccctcccgctcgccagtccatttgatcagcggagactcggcggccgggccggggcttccccgcagcccctgcgcgctcctagagctcgggccgtggctcgtcggggtctgtgtcttttggctccgagggcagtcgctgggcttccgagaggggttcgggctgcgtaggggcgctttgttttgttcggttttgtttttttgagagtgcgagagaggcggtcgtgcagacccgggagaaagatgtcaaacgtgcgagtgtctaacgggagccctagcctggagcggatggacgccaggcaggcggagcaccccaagccctcggcctgcaggaacctcttcggcccggtggaccacgaagagttaacccgggacttggagaagcactgcagagacatggaagaggcgagccagcgcaagtggaatttcgattttcagaatcacaaacccctagagggcaagtacgagtggcaagaggtggagaagggcagcttgcccgagttctactacagacccccgcggccccccaaaggtgcctgcaaggtgccggcgcaggagagccaggatgtcagcgggagccgcccggcggcgcctttaattggggctccggctaactctgaggacacgcatttggtggacccaaagactgatccgtcggacagccagacggggttagcggagcaatgcgcaggaataaggaagcgacctgcaaccgacgattcttctactcaaaacaaaagagccaacagaacagaagaaaatgtttcagacggttccccaaatgccggttctgtggagcagacgcccaagaagcctggcctcagaagacgtcaaacgtaaacagctcgaattaagaatatgtttccttgtttatcagatacatcactgcttgatgaagcaaggaagatatacatgaaaattttaaaaatacatatcgctgacttcatggaatggacatcctgtataagcactgaaaaacaacaacacaataacactaaaattttaggcactcttaaatgatctgcctctaaaagcgttggatgtagcattatgcaattaggtttttccttatttgcttcattgtactacctgtgtatatagtttttaccttttatgtagcacataaactttggggaagggagggcagggtggggctgaggaactgacgtggagcggggtatgaagagcttgctttgatttacagcaagtagataaatatttgacttgcatgaagagaagcaattttggggaagggtttgaattgttttctttaaagatgtaatgtccctttcagagacagctgatacttcatttaaaaaaatcacaaaaatttgaacactggctaaagataattgctatttatttttacaagaagtttattctcatttgggagatctggtgatctcccaagctatctaaagtttgttagatagctgcatgtggcttttttaaaaaagcaacagaaacctatcctcactgccctccccagtctctcttaaagttggaatttaccagttaattactcagcagaatggtgatcactccaggtagtttggggcaaaaatccgaggtgcttgggagttttgaatgttaagaattgaccatctgcttttattaaatttgttgacaaaattttctcattttcttttcacttcgggctgtgtaaacacagtcaaaataattctaaatccctcgatatttttaaagatctgtaagtaacttcacattaaaaaatgaaatattttttaatttaaagcttactctgtccatttatccacaggaaagtgttatttttcaaggaaggttcatgtagagaaaagcacacttgtaggataagtgaaatggatactacatctttaaacagtatttcattgcctgtgtatggaaaaaccatttgaagtgtacctgtgtacataactctgtaaaaacactgaaaaattatactaacttatttatgttaaaagattttttttaatctagacaatatacaagccaaagtggcatgttttgtgcatttgtaaatgctgtgttgggtagaataggttttcccctcttttgttaaataatatggctatgcttaaaaggttgcatactgagccaagtataattttttgtaatgtgtgaaaaagatgccaattattgttacacattaagtaatcaataaagaaaacttccatagctatt

SEQ ID NO: 69 - RNA, 1464 nt, Homo sapiens
  source 1..1464: mol_type = mRNA
cgagggctgcttccggctggtgcccccgggggagacccaacctggggcgacttcaggggtgccacattcgctaagtgctcggagttaatagcacctcctccgagcactcgctcacggcgtccccttgcctggaaagataccgcggtccctccagaggatttgagggacagggtcggagggggctcttccgccagcaccggaggaagaaagaggaggggctggctggtcaccagagggtggggcggaccgcgtgcgctcggcggctgcggagagggggagagcaggcagcgggcggcggggagcagcatggagccggcggcggggagcagcatggagccttcggctgactggctggccacggccgcggcccggggtcgggtagaggaggtgcgggcgctgctggaggcgggggcgctgcccaacgcaccgaatagttacggtcggaggccgatccaggtcatgatgatgggcagcgcccgagtggcggagctgctgctgctccacggcgcggagcccaactgcgccgaccccgccactctcacccgacccgtgcacgacgctgcccgggagggcttcctggacacgctggtggtgctgcaccgggccggggcgcggctggacgtgcgcgatgcctggggccgtctgcccgtggacctggctgaggagctgggccatcgcgatgtcgcacggtacctgcgcgcggctgcggggggcaccagaggcagtaaccatgcccgcatagatgccgcggaaggtccctcagaaatgatcggaaaccatttgtgggtttgtagaagcaggcatgcgtagggaagctacgggattccgccgaggagcgccagagcctgaggcgccctttggttatcgcaagctggctggctcactccgcaccaggtgcaaaagatgcctggggatgcgggaagggaaaggccacatcttcacgccttcgcgcctggcattacatccccgattgaaagaaccagagaggctctgagaaacctcgggaaacttagatcatcagtcaccgaaggtcctacagggccacaactgcccccgccacaacccaccccgctttcgtagttttcatttagaaaatagagcttttaaaaatgtcctgccttttaacgtagatatatgccttcccccactaccgtaaatgtccatttatatcattttttatatattcttataaaaatgtaaaaaagaaaaacaccgcttctgccttttcactgtgttggagttttctggagtgagcactcacgccctaagcgcacattcatgtgggcatttcttgcgagcctcgcagcctccggaagctgtcgacttcatgacaagcattttgtgaactagggaagctcaggggggttactggcttctcttgagtcacactgctagcaaatggcagaaccaaagctcaaataaaaataaaataattttcattcattcactcaaaaaaaaaaaaaa

SEQ ID NO: 70 - RNA, 11061 nt, Homo sapiens
  source 1..11061: mol_type = mRNA
atactcagtcacacaagccatagcaggaaacagcgagcttgcagcctcaccgacgagtctcaactaaaagggactcccggagctaggggtggggactcggcctcacacagtgagtgccggctattggacttttgtccagtgacagctgagacaacaaggaccacgggaggaggtgtaggagagaagcgccgcgaacagcgatcgcccagcaccaagtccgcttccaggctttcggtttctttgcctccatcttgggtgcgccttcccggcgtctaggggagcgaaggctgaggtggcagcggcaggagagtccggccgcgacaggacgagtgctgatggcagagattggtgaggatttggataaatctgatgtgtcctcattaattttcctcatgaaggattacatgggccgaggcaagataagcaaggagaagagtttcttggaccttgtggttgagttggagaaactaaatctggttgccccagatcaactggatttattagaaaaatgcctaaagaacatccacagaatagacctgaagacaaaaatccagaagtacaagcagtctgttcaaggagcagggacaagttacaggaatgttctccaagcagcaatccaaaagagtctcaaggatccttcaaataacttcaggctccataatgggagaagtaaagaacaaagacttaaggaacagcttggcgctcaacaagaaccagtgaagaaatccattcaggaatcagaagcttttttgcctcagagcatacctgaagagagatacaagatgaagagcaagcccctaggaatctgcctgataatcgattgcattggcaatgagacagagcttcttcgagacaccttcacttccctgggctatgaagtccagaaattcttgcatctcagtatgcatggtatatcccagattcttggccaatttgcctgtatgcccgagcaccgagactacgacagctttgtgtgtgtcctggtgagccgaggaggctcccagagtgtgtatggtgtggatcagactcactcagggctccccctgcatcacatcaggaggatgttcatgggagattcatgcccttatctagcagggaagccaaagatgttttttattcagaactatgtggtgtcagagggccagctggaggacagcagcctcttggaggtggatgggccagcgatgaagaatgtggaattcaaggctcagaagcgagggctgtgcacagttcaccgagaagctgacttcttctggagcctgtgtactgcggacatgtccctgctggagcagtctcacagctcaccatccctgtacctgcagtgcctctcccagaaactgagacaagaaagggggacaattcccggaagtggaattacagagtcaaaggacatgcatttttcaagcctcggatgcatcttactagatgtcctataggatggtcatatcagctttataggagagtagctgtgtccctgaattctccctgacactgcatgctcttatatttcctcaagttttgacaatttgataggtgaaaagtggtatctgactgttcagatctggaaggctttgttatataaacatttttttaatgtttattggcaagaatacttttctaagagaaacatcagtgagctggtttccatttaagctgaatgaagccacaatgtacctcaagtataagattaactggcctttttcagttgcactctaattacaatttagaatgatgtttctgagccacctgtcaaatgcattctgggctgtacctctgcgtaccccaggaataaatctcatggccttctttacctggcctccttagtggtggcccagcaggaagcgggggttagagcaggagccactcagccttccaagatagatactccatgggccggtggtattactggccttttgagcccatccccatttgcatagatgatccacgtgggttatcatctggctggtatgttcccagagtgaaactcagcagccccttgagggaggggatggtggccatcaggccagagtattgcaagttagtttggatcatttgctaagcagcttgtggtgccttcagaaaggaacagtttcaaagaactttcacatctgttggctcatttcgccctaatgacagtcttctctttgatatttgcatggcattaaattttgcctttcttgttttctccagaaaacgcccactcctggatcttcacattgaactcaatggctacatgtatgattggaacagcagagtttctgccaaggagaaatattatgtctggctgcagcacactctgagaaagaaacttatcctctcctacacataagaaaccaaaaggctgggcgtagtggctcacacctgtaatcccagcactttgggaggccaaggagggcagatcacttcaggtcaggagttcgagaccagcctggccaacatggtaaacgctgtccctagtaaaaatacaaaaattagctgggtgtgggtgtgggtacctgtattcccagttacttgggaggctgaggtgggaggatcttttgaacccaggagttcagggtcatagcatgctgtgattgtgcctacgaatagccactgcataccaacctgggcaatatagcaagatcccatctctttaaaaaaaaaaaaaaaggacaggaactatcttactcaatgtattagtcatgtttctctagagggacagaactaataggatacatgtatataaaaaggggagtttattaaggagtattgactcacatgatcacagggttaggtcccacaataggtcatctgcaagcaaggaagccaattcaagtcccaaagctgaagaacttggagtccaatgtttgagggcaggaagcattcagcatgagagaaagatggaggccagaagactacaccagtctagtctttccatgttttgcctgcttttattctggcagtgctggcagctgattagatggtgcccacccagattgaggatggtctgcctttcccagtccactgactcaaatgttaaatctcctttggcagcaccctcacagatgtacccgggaacactttgcatccttctattcaatcaagttgatactcagtattaaccatcacagtccatttgggcaactataccaaattaccatagaccaggtgacttaaacagcagttatttctcacagttccggaggctgggaaatccaacatctaagtggtagcatatctggtgtctggtaaggcatgcttccagatcttaccagatgtcagtcttttgatgttctcacatggcagaaaaagaggatgcaaactctcaagtatatctttaagggcacaaattccattcatgagggctctaccctcatcacctaattacctcccaaaggccccaccttctgatactgtcactttggggatactgtctcccctttgaattctggggggaatacaaacattcagtttgtaacaatagccttatgatttagaggttacttgttcattcacctagacctcaaattgcattttacagctagtcaagtatatctttctctgatttgatagtgtgacctaaaaggggaccattgtttgaaatatcattagagttgcttattattattattattattattattattattattattattattattgagacagagtttcattctgctgcccaggctggagtgcagtggcatcatcttggctcattgcaacctctgccttctgggttcaagcgattctcctgcctcagcctcccgagtagctgggattacaggctcctgccaccacacccggctaatttttgtatttttagtggagacagggtttccaccatgttggccagcgtggtcttgaactcctgacctcaggtgattcaccagcctcggcctcccaaagtgctgggattacaggtgtgagccactgcacctggcctattattatttttaaattttttttttttaattgatcattcttgggtgtttctcacagagggtgatttggcagggtcacaggacaatagtggagggaaggtcagcagataaacaagtgaacaaaggtctctggttttcctaggcagaggaccctgcggccttccgcagtgtttgtgtccctgggtacttgagattagggagtggtgatgactcttaaggagcatgctgccttcaagcatctgtttaacaaagcacatcttgcactgcccttaatccatttaaccctgagtggacacagcacatgtttcagagagcacagggttgggggtaaggtcatagatcaacagcatcctaaggcagaagaatttttcttagtacagaacaaaatgaagtctcccatgtctacttctttctacacagacacagcaacaatctgatttctctatcttttccccacctttcccccttttctattccacaaaaccgccatcgtcatcatggcctgttctcaatgagctgttgggtacacctcccagacggggtggcggctgggcagaggggctcctcacttcccagatggggcggccaggcggacgcgccccccacctccctcccggacgggatagctggccgggcgggggctgaccccccacctccctccccgacggggcggctggccgggcgggggctgacccccacgcctccctcccggacggggcggctgccaggcggaggggctcctcacttctcagacggggtggctgctgggcggagacgctcctcacttcccagacagggtggctgtcgggcggaggggctcctcacttctcagacggggcagctgcgggcggaggggctcctcacttctcagacggggtggccgggcagagaagctcctcacatcccagacgggggggcggggcagaggcgctccccacatctcagacgatgggcggccgggcagagacgctcctcacttcatcccagacggggtggcggccgggcagaagctgtaatctcggcaccctggggggccaaggcaggcggctgggaggcggaggccgtagccagctgagatcacaccactgcactccagcctgggcaacattgagcactgagtggacgagactctgcccgcaatcccggcacctcgggaggccgaggctggcagatcactcgcagtcaggagctggagaccagcccggccaacacagtgaaaccctgtctccaccaaaaaaatacgaaaaccagtcaggcgtggcggcgcccgcaatggcaggcacgcggcaggccgaggcgggagaatcaggcagggaggctgcagtgagccgagatggcagcagtacagtccagcttcggctcggcatcagagggagaccgtggggagagggagaagagagggagggggagagggctatttttaaaattttttaaaattgctgaacaggggtacctctgggcagtgtgtcagaataccactttttaaatattttatgatttatttatttttctatttcttgaggttttaactgatgtgtatctgtatgtctatttgtgtatattttgtcatgatcatgtaacagagtctgaaaagtgtcgaagagacagttttcaggaacaacaagcaattattcctactttccaagttattttgatgccatggtggctcatacctataatctgagtactttgggaggctgaggtggactgatcacttgagcccaggagtttgagaccagcctgggcaacatagcaagactccatctctacaaaaaaagacaaaatttagctgagcgtggtggcgtgttcctgtagtcccagctacttgggaggctgaagtgagtggatcccctgagcccagagaggtcaaggttgtgatgagctgtgatcacaccactgcacttcagcatgggagacagagtgagaccctgtttcagaaaaaataaataaataaaaccaccagcaccacaaacaacaacaaaaagttattttgtacttgttttgagcacaggactcctgagggtatctttgcatttaatattacataggggtgccagtgggaagtaatgtgtatgcttggcctcatgagctaaaaccctgtgttaattatgacagaaggaaagtgtgtgagagagatcttaactacctagcagctctagctgccatcttgaaccatgaagatacgggccacacgtaggggtagctgggtagtgagcagcaagaagccttgttggatgagggcacgaaggagcagaatcactggaatcactgtgtcagccctaattacctacctctggacttttatgtgaggggaaaaaaaattgacagtttatatttatctcaacctagttaacccaagtgatgcattgttatgagattaaaatgtttggaggccgggtgcggtggctcacgcctataatcccagccctttgggaggccaaggcgggcggatcacgaggtcaggagatcaagaccatcctggctaacatgtaaaaccccgtctctactaaaaatacaaaaaattagccaggcgttgtggcggtcgcctgtagtccctgctatttgggaggccgaggcaagagaacggcatgaacctgggaggtggagcttgcagcgagctgagatcttgccactgcactccagcctgggcgacagtgcgagactctgtctcaaaaataaataaataaataaataataaataaaatgtttggaatgttggcttcatccctgggatgcaaggctggttcaacatacgcaaatcaagaaacataattcatcacataaacagaactaaagacaaaaaccacatgattatctcaatagatacagaaaaggccttcaataaaattcaacgttgcttcatgttaaaaactctcaataaactaggtattgatggaaaatatctcaaaataataaccatttatgacaaacccacagccattatcatactgaatgggcaaaagctggaagcattccccttgaaaactggcacaagacagggatgccgtctcaccactcctatttaacatagtattggaagttctggccaagaaaatcaggcaagagaaacaaataaggggtattcaaataggaaaagaggaagtaaaactgtgtttgcagatgacatgatactatatctagaaaaccccattatctccacccaaaagttccttaagctgataagcaacttcagcaaagtctcaggatacaaaatcaatgtgcagaaatcacaagcattctatacaccaacaatacacaagcagagagccaaatcatgaatgaactcccattcacagttgctagaaagagaataaaatacctaggaatacagctaataagatgtgaaggatctcttcaaggagaactacaaaccactgctcaaggaaataagagaggacacaaatgaaaaaacattccattctcgtggataggaagaatcaatatcatgaaaatggccatactacccaaagtaatttataggttcattgctattcccattaaactactattgacattcttcacagaattagaaaaaaactactttaaaattcaaatggaaccaaaaaagagcccgtataaccaagacaacaataagcaaaaagaacaaagctggaagcatcacactacccaacttcaaagtatactgcaaggctacagtagccaaaatggcatggtactggtacaaaaacagacacatagaccaatggaacagaatagagaccagagaaagaagaccacacatctacagccatctgatcatcgacaaacctgacaaaaacaagcaatggggaaaagattccctatttaataaatggtgctgggaaaactggctagccatatgcagaaaattgaaactgaccccttccttacaccttatacaaaaattaactcaagattaaagacttaatgtaaaacctaaaactataaaaaccctagaagaaaatctatttaataccattcaagacataggcacaagcaaaggtttcatgacaaaaacatcaaaagcaattgcaacaaaagcaaaaattacaaatgggatctaattaaactaaagagctcctgcacagcaaaagaaactatcattagagtgaacaggcaacctacagaatgggagaacatttttgcaatctatccatctgacaaaggtctaatatccagaacctacaaggaacttaaaacaaatttacaaggaaaaaaacaaccccatcaaaaagtggacaaaggacatgaacagacacttctcaaaagaagacatttatgtggccaacaaacatataaaaaaaagctcaaccttactgatcattagagaaatgcaaaggagaaccacaatgagataccatctcatgccggtcagaatggtgattattaaaaagtcaaaaaacaacagatgctggcgaggctgtggagaagtaggaacacttttacattgttggtgggaatgtaaattagttcaaccgttgtggaagtgtgtgtggctattcctcaaagatctagaactagaaatactatttgtcccagcaatcccattactgggtatatacccaaaggaatataaaccattttattataaagatacatgcacatttttgttcattgcagcactcttcacaatagcaaagacacaatagcaaatgcccatcaaagatagactggataaagaaaatgtggtacatatacaccatggaatactgtgcagtgcagccattacagcttttggtgatacagtgaatcagatttttcattaattcttttaattggttattactgaacgtgaaaaagtaatgtttgtattgaaatcttgagtctggccatgtttctattttaaattcataaagaattctaacaagaggaattccaagaatgtcataaatggatgtttctccatggatgaaggaactgttttattcacttgctgataattcagcctaatccagtttgacatcatatagataagtagttgaattatggatttaaaatacatatcattttctaactccaaaggtaatacttatttaaatggttttgaaaatatagaaaggcacaatttctttttaaatctgttattctccaccaccactcaatctgtctatcatctatctctccattcattcttccatttgtttatatctgttaatctttgtatgtgttcatgtatagcttttacatgattggaatcataatgcatattccattttgaagtctgcttttttttacacaaaaatatgttgtgaatattttcctatattatgaaatatcattagctgagcttttagaattgactgcatgttttggtaccatttagatatagtttaagatacttagaagttatgtggctttgccactatggatgaatcttatttactcaatattaattacttacaaataacctcacctaaacactactcagccataaaaaggaatgaattaatgacattcacagcaacctggagactattactctaaaggaagtaactgaggaatggaaaaccaaacattgtatgttctcactcataagtgggagataagctatgaggatgcaaaggcataagaaggatacaatggactttggggacttaggggaaagggtgggaggggggtgaaggataaaagaatacaaattgggttcagtgtatactgctcaggtgatgggtgcaccagaatctcacaagtaaccacttaattacttacgcatgtaaccagataccacctgttccccaaacacctatggaaataattttgtttttttttttaaaaaaggaatgagatcatgtcctttgcagggacatggatgaagctggaagccattatcctcagcaaactaacagaggagcaggaaaccaaacaccacatgttctcacttgtaagcggaagctgaacaatgagaacacacggacacagggatgagatcaacacacactggggcctgatgcaggggccgtagcggggagagcatcaggataactagctaatgcatgtggggcttaatacctaggtgataggttgataggtgcagcaaaccaccatgggacacgtttacctatgtaacaaacccgcacatcctgcacttgtatccagaacttaaaatattttaaaaatctttagagaatacaaaaaaaaaaaaaaagattcttcaatgcatacacaataaaattgcagttcagtcaaacattggaagtctttctctgactgtctagttggtatcttcattttcagcttcttcaagatcccactccaaacactgttagctcagccaaattgaacagctcatatctcctacctctggatctttggttctggtgattgtatatttctggaccatctggaaccccagcatatcaccctaccccacatctccacatccccaaaatataaccatacttcaagggcagttcaaataccatctccttctatcctccatgaagtcagttatctcttccattggaattatcgccccctctcctgaacagtactatttcgtgtgaatctcctccaagccttcttttcattttatatctcatgctgtaattcttggaaagtatgctgtagctcaagtgcagaattctcatcagttttatctttatatctctcctaaacactttacctgatgaagagcctggcatacacataaatatatattgaatgaatcagtgatggattgaaaagagaaatgatggatctcctaaattttaacttttataaaatattttgatacattcatgaccttactttagcaagcaatgaacgtgatgtaaactattgttgatatagtttttatattggaagtgtaagtagtttgtggcatgggattgtgacatatcctaggtttcctcatcttctttttattgaaatgtaattcacaagccataaaatttgcccctttaaagtaaatgatgcagtggattttagtatatttacagagttgtgcaatcatcaccactatctaattccagaacatttccatctacctagaaactccataccagtgagctgccactctaatcctcctcttcccccagcctctagaaacaataatccattttctgtctctatgatttgcctgttctagatattttataaaaataaacatgtggcctttcgtgtctgacttccttcacttaaaaaaaaaaaaaaaaaa

SEQ ID NO: 71 - RNA, 3720 nt, Homo sapiens
  source 1..3720: mol_type = mRNA
aggatacagcggcttctgcgcgacttataagagctccttgtgcggcgccattttaagcctctcggtctgtggcagcagcgttggcccggccccgggagcggagagcgaggggaggcggagacggaggaaggtctgaggagcagcttcagtccccgccgagccgccaccgcaggtcgaggacggtcggactcccgcggcgggaggagcctgttcccctgagggtatttgaagtataccatacaactgttttgaaaatccagcgtggacaatggctactcaagctgatttgatggagttggacatggccatggaaccagacagaaaagcggctgttagtcactggcagcaacagtcttacctggactctggaatccattctggtgccactaccacagctccttctctgagtggtaaaggcaatcctgaggaagaggatgtggatacctcccaagtcctgtatgagtgggaacagggattttctcagtccttcactcaagaacaagtagctgatattgatggacagtatgcaatgactcgagctcagagggtacgagctgctatgttccctgagacattagatgagggcatgcagatcccatctacacagtttgatgctgctcatcccactaatgtccagcgtttggctgaaccatcacagatgctgaaacatgcagttgtaaacttgattaactatcaagatgatgcagaacttgccacacgtgcaatccctgaactgacaaaactgctaaatgacgaggaccaggtggtggttaataaggctgcagttatggtccatcagctttctaaaaaggaagcttccagacacgctatcatgcgttctcctcagatggtgtctgctattgtacgtaccatgcagaatacaaatgatgtagaaacagctcgttgtaccgctgggaccttgcataacctttcccatcatcgtgagggcttactggccatctttaagtctggaggcattcctgccctggtgaaaatgcttggttcaccagtggattctgtgttgttttatgccattacaactctccacaaccttttattacatcaagaaggagctaaaatggcagtgcgtttagctggtgggctgcagaaaatggttgccttgctcaacaaaacaaatgttaaattcttggctattacgacagactgccttcaaattttagcttatggcaaccaagaaagcaagctcatcatactggctagtggtggaccccaagctttagtaaatataatgaggacctatacttacgaaaaactactgtggaccacaagcagagtgctgaaggtgctatctgtctgctctagtaataagccggctattgtagaagctggtggaatgcaagctttaggacttcacctgacagatccaagtcaacgtcttgttcagaactgtctttggactctcaggaatctttcagatgctgcaactaaacaggaagggatggaaggtctccttgggactcttgttcagcttctgggttcagatgatataaatgtggtcacctgtgcagctggaattctttctaacctcacttgcaataattataagaacaagatgatggtctgccaagtgggtggtatagaggctcttgtgcgtactgtccttcgggctggtgacagggaagacatcactgagcctgccatctgtgctcttcgtcatctgaccagccgacaccaagaagcagagatggcccagaatgcagttcgccttcactatggactaccagttgtggttaagctcttacacccaccatcccactggcctctgataaaggctactgttggattgattcgaaatcttgccctttgtcccgcaaatcatgcacctttgcgtgagcagggtgccattccacgactagttcagttgcttgttcgtgcacatcaggatacccagcgccgtacgtccatgggtgggacacagcagcaatttgtggagggggtccgcatggaagaaatagttgaaggttgtaccggagcccttcacatcctagctcgggatgttcacaaccgaattgttatcagaggactaaataccattccattgtttgtgcagctgctttattctcccattgaaaacatccaaagagtagctgcaggggtcctctgtgaacttgctcaggacaaggaagctgcagaagctattgaagctgagggagccacagctcctctgacagagttacttcactctaggaatgaaggtgtggcgacatatgcagctgctgttttgttccgaatgtctgaggacaagccacaagattacaagaaacggctttcagttgagctgaccagctctctcttcagaacagagccaatggcttggaatgagactgctgatcttggacttgatattggtgcccagggagaaccccttggatatcgccaggatgatcctagctatcgttcttttcactctggtggatatggccaggatgccttgggtatggaccccatgatggaacatgagatgggtggccaccaccctggtgctgactatccagttgatgggctgccagatctggggcatgcccaggacctcatggatgggctgcctccaggtgacagcaatcagctggcctggtttgatactgacctgtaaatcatcctttaggtaagaagttttaaaaagccagtttgggtaaaatacttttactctgcctacagaacttcagaaagacttggttggtagggtgggagtggtttaggctatttgtaaatctgccacaaaaacaggtatatactttgaaaggagatgtcttggaacattggaatgttctcagatttctggttgttatgtgatcatgtgtggaagttattaactttaatgttttttgccacagcttttgcaacttaatactcaaatgagtaacatttgctgttttaaacattaatagcagcctttctctctttatacagctgtattgtctgaacttgcattgtgattggcctgtagagttgctgagagggctcgaggggtgggctggtatctcagaaagtgcctgacacactaaccaagctgagtttcctatgggaacaattgaagtaaactttttgttctggtcctttttggtcgaggagtaacaatacaaatggattttgggagtgactcaagaagtgaagaatgcacaagaatggatcacaagatggaatttatcaaaccctagccttgcttgttaaatttttttttttttttttttaagaatatctgtaatggtactgactttgcttgctttgaagtagctctttttttttttttttttttttttttgcagtaactgttttttaagtctctcgtagtgttaagttatagtgaatactgctacagcaatttctaatttttaagaattgagtaatggtgtagaacactaattcataatcactctaattaattgtaatctgaataaagtgtaacaattgtgtagcctttttgtataaaatagacaaatagaaaatggtccaattagtttcctttttaatatgcttaaaataagcaggtggatctatttcatgtttttgatcaaaaactatttgggatatgtatgggtagggtaaatcagtaagaggtgttatttggaaccttgttttggacagtttaccagttgccttttatcccaaagttgttgtaacctgctgtgatacgatgcttcaagagaaaatgcggttataaaaaatggttcagaattaaacttttaattcattcgattg

SEQ ID NO: 72 - RNA, 1912 nt, Homo sapiens
  source 1..1912: mol_type = mRNA
ttttttttcttccctctagtgggcggggcagaggagttagccaagatgtgactttgaaaccctcagcgtctcagtgcccttttgttctaaacaaagaattttgtaattggttctaccaaagaaggatataatgaagtcactatgggaaaagatggggaggagagttgtaggattctacattaattctcttgtgcccttagcccactacttcagaatttcctgaagaaagcaagcctgaattggttttttaaattgctttaaaaattttttttaactgggttaatgcttgctgaattggaagtgaatgtccattcctttgcctcttttgcagatatacacttcagataactacaccgaggaaatgggctcaggggactatgactccatgaaggaaccctgtttccgtgaagaaaatgctaatttcaataaaatcttcctgcccaccatctactccatcatcttcttaactggcattgtgggcaatggattggtcatcctggtcatgggttaccagaagaaactgagaagcatgacggacaagtacaggctgcacctgtcagtggccgacctcctctttgtcatcacgcttcccttctgggcagttgatgccgtggcaaactggtactttgggaacttcctatgcaaggcagtccatgtcatctacacagtcaacctctacagcagtgtcctcatcctggccttcatcagtctggaccgctacctggccatcgtccacgccaccaacagtcagaggccaaggaagctgttggctgaaaaggtggtctatgttggcgtctggatccctgccctcctgctgactattcccgacttcatctttgccaacgtcagtgaggcagatgacagatatatctgtgaccgcttctaccccaatgacttgtgggtggttgtgttccagtttcagcacatcatggttggccttatcctgcctggtattgtcatcctgtcctgctattgcattatcatctccaagctgtcacactccaagggccaccagaagcgcaaggccctcaagaccacagtcatcctcatcctggctttcttcgcctgttggctgccttactacattgggatcagcatcgactccttcatcctcctggaaatcatcaagcaagggtgtgagtttgagaacactgtgcacaagtggatttccatcaccgaggccctagctttcttccactgttgtctgaaccccatcctctatgctttccttggagccaaatttaaaacctctgcccagcacgcactcacctctgtgagcagagggtccagcctcaagatcctctccaaaggaaagcgaggtggacattcatctgtttccactgagtctgagtcttcaagttttcactccagctaacacagatgtaaaagacttttttttatacgataaataacttttttttaagttacacatttttcagatataaaagactgaccaatattgtacagtttttattgcttgttggatttttgtcttgtgtttctttagtttttgtgaagtttaattgacttatttatataaattttttttgtttcatattgatgtgtgtctaggcaggacctgtggccaagttcttagttgctgtatgtctcgtggtaggactgtagaaaagggaactgaacattccagagcgtgtagtgaatcacgtaaagctagaaatgatccccagctgtttatgcatagataatctctccattcccgtggaacgtttttcctgttcttaagacgtgattttgctgtagaagatggcacttataaccaaagcccaaagtggtatagaaatgctggtttttcagttttcaggagtgggttgatttcagcacctacagtgtacagtcttgtattaagttgttaataaaagtacatgttaaacttaaaaaaaaaaaaaaaaaa

SEQ ID NO: 73 - RNA, 2722 nt, Homo sapiens
  source 1..2722: mol_type = mRNA
ttggcgcgtaaaagtggccgggactttgcaggcagcggcggccgggggcggagcgggatcgagccctcgccgaggcctgccgccatgggcccgcgccgccgccgccgcctgtcacccgggccgcgcgggccgtgagcgtcatggccttggccggggcccctgcgggcggcccatgcgcgccggcgctggaggccctgctcggggccggcgcgctgcggctgctcgactcctcgcagatcgtcatcatctccgccgcgcaggacgccagcgccccgccggctcccaccggccccgcggcgcccgccgccggcccctgcgaccctgacctgctgctcttcgccacaccgcaggcgccccggcccacacccagtgcgccgcggcccgcgctcggccgcccgccggtgaagcggaggctggacctggaaactgaccatcagtacctggccgagagcagtgggccagctcggggcagaggccgccatccaggaaaaggtgtgaaatccccgggggagaagtcacgctatgagacctcactgaatctgaccaccaagcgcttcctggagctgctgagccactcggctgacggtgtcgtcgacctgaactgggctgccgaggtgctgaaggtgcagaagcggcgcatctatgacatcaccaacgtccttgagggcatccagctcattgccaagaagtccaagaaccacatccagtggctgggcagccacaccacagtgggcgtcggcggacggcttgaggggttgacccaggacctccgacagctgcaggagagcgagcagcagctggaccacctgatgaatatctgtactacgcagctgcgcctgctctccgaggacactgacagccagcgcctggcctacgtgacgtgtcaggaccttcgtagcattgcagaccctgcagagcagatggttatggtgatcaaagcccctcctgagacccagctccaagccgtggactcttcggagaactttcagatctcccttaagagcaaacaaggcccgatcgatgttttcctgtgccctgaggagaccgtaggtgggatcagccctgggaagaccccatcccaggaggtcacttctgaggaggagaacagggccactgactctgccaccatagtgtcaccaccaccatcatctcccccctcatccctcaccacagatcccagccagtctctactcagcctggagcaagaaccgctgttgtcccggatgggcagcctgcgggctcccgtggacgaggaccgcctgtccccgctggtggcggccgactcgctcctggagcatgtgcgggaggacttctccggcctcctccctgaggagttcatcagcctttccccaccccacgaggccctcgactaccacttcggcctcgaggagggcgagggcatcagagacctcttcgactgtgactttggggacctcacccccctggatttctgacagggcttggagggaccagggtttccagagatgctcaccttgtctctgcagccctggagccccctgtccctggccgtcctcccagcctgtttggaaacatttaatttatacccctctcctctgtctccagaagcttctagctctggggtctggctaccgctaggaggctgagcaagccaggaagggaaggagtctgtgtggtgtgtatgtgcatgcagcctacacccacacgtgtgtaccgggggtgaatgtgtgtgagcatgtgtgtgtgcatgtaccggggaatgaaggtgaacatacacctctgtgtgtgcactgcagacacgccccagtgtgtccacatgtgtgtgcatgagtccatgtgtgcgcgtgggggggctctaactgcactttcggcccttttgctctgggggtcccacaaggcccagggcagtgcctgctcccagaatctggtgctctgaccaggccaggtggggaggctttggctggctgggcgtgtaggacggtgagagcacttctgtcttaaaggttttttctgattgaagctttaatggagcgttatttatttatcgaggcctctttggtgagcctggggaatcagcaaaggggaggaggggtgtggggttgataccccaactccctctacccttgagcaagggcaggggtccctgagctgttcttctgccccatactgaaggaactgaggcctgggtgatttatttattgggaaagtgagggagggagacagactgactgacagccatgggtggtcagatggtggggtgggccctctccagggggccagttcagggccccagctgccccccaggatggatatgagatgggagaggtgagtgggggaccttcactgatgtgggcaggaggggtggtgaaggcctcccccagcccagaccctgtggtccctcctgcagtgtctgaagcgcctgcctccccactgctctgccccaccctccaatctgcactttgatttgcttcctaacagctctgttccctcctgctttggttttaataaatattttgatgacgtttgggccgggttttgggactctgttgggaacatttcggggcgggagaggccaaggttgctggggaaatgcccattctccacttcccttctccctgtccgtgcccgatttgatttgagcctcataactcgaagaaaggtcagcttcctcgctgttttggtcctaactcaaaagcagatccagtaaaggtttttgttgtaaaaaaaaaaaaaaaaaaaaaaa

SEQ ID NO: 74 - RNA, 5600 nt, Homo sapiens
  source 1..5600: mol_type = mRNA
aaaaagagaaactgttgggagaggaatcgtatctccatatttcttctttcagccccaatccaagggttgtagctggaactttccatcagttcttcctttctttttcctctctaagcctttgccttgctctgtcacagtgaagtcagccagagcagggctgttaaactctgtgaaatttgtcataagggtgtcaggtatttcttactggcttccaaagaaacatagataaagaaatctttcctgtggcttcccttggcaggctgcattcagaaggtctctcagttgaagaaagagcttggaggacaacagcacaacaggagagtaaaagatgccccagggctgaggcctccgctcaggcagccgcatctggggtcaatcatactcaccttgcccgggccatgctccagcaaaatcaagctgttttcttttgaaagttcaaactcatcaagattatgctgctcactcttatcattctgttgccagtagtttcaaaatttagttttgttagtctctcagcaccgcagcactggagctgtcctgaaggtactctcgcaggaaatgggaattctacttgtgtgggtcctgcacccttcttaattttctcccatggaaatagtatctttaggattgacacagaaggaaccaattatgagcaattggtggtggatgctggtgtctcagtgatcatggattttcattataatgagaaaagaatctattgggtggatttagaaagacaacttttgcaaagagtttttctgaatgggtcaaggcaagagagagtatgtaatatagagaaaaatgtttctggaatggcaataaattggataaatgaagaagttatttggtcaaatcaacaggaaggaatcattacagtaacagatatgaaaggaaataattcccacattcttttaagtgctttaaaatatcctgcaaatgtagcagttgatccagtagaaaggtttatattttggtcttcagaggtggctggaagcctttatagagcagatctcgatggtgtgggagtgaaggctctgttggagacatcagagaaaataacagctgtgtcattggatgtgcttgataagcggctgttttggattcagtacaacagagaaggaagcaattctcttatttgctcctgtgattatgatggaggttctgtccacattagtaaacatccaacacagcataatttgtttgcaatgtccctttttggtgaccgtatcttctattcaacatggaaaatgaagacaatttggatagccaacaaacacactggaaaggacatggttagaattaacctccattcatcatttgtaccacttggtgaactgaaagtagtgcatccacttgcacaacccaaggcagaagatgacacttgggagcctgagcagaaactttgcaaattgaggaaaggaaactgcagcagcactgtgtgtgggcaagacctccagtcacacttgtgcatgtgtgcagagggatacgccctaagtcgagaccggaagtactgtgaagatgttaatgaatgtgctttttggaatcatggctgtactcttgggtgtaaaaacacccctggatcctattactgcacgtgccctgtaggatttgttctgcttcctgatgggaaacgatgtcatcaacttgtttcctgtccacgcaatgtgtctgaatgcagccatgactgtgttctgacatcagaaggtcccttatgtttctgtcctgaaggctcagtgcttgagagagatgggaaaacatgtagcggttgttcctcacccgataatggtggatgtagccagctctgcgttcctcttagcccagtatcctgggaatgtgattgctttcctgggtatgacctacaactggatgaaaaaagctgtgcagcttcaggaccacaaccatttttgctgtttgccaattctcaagatattcgacacatgcattttgatggaacagactatggaactctgctcagccagcagatgggaatggtttatgccctagatcatgaccctgtggaaaataagatatactttgcccatacagccctgaagtggatagagagagctaatatggatggttcccagcgagaaaggcttattgaggaaggagtagatgtgccagaaggtcttgctgtggactggattggccgtagattctattggacagacagagggaaatctctgattggaaggagtgatttaaatgggaaacgttccaaaataatcactaaggagaacatctctcaaccacgaggaattgctgttcatccaatggccaagagattattctggactgatacagggattaatccacgaattgaaagttcttccctccaaggccttggccgtctggttatagccagctctgatctaatctggcccagtggaataacgattgacttcttaactgacaagttgtactggtgcgatgccaagcagtctgtgattgaaatggccaatctggatggttcaaaacgccgaagacttacccagaatgatgtaggtcacccatttgctgtagcagtgtttgaggattatgtgtggttctcagattgggctatgccatcagtaatgagagtaaacaagaggactggcaaagatagagtacgtctccaaggcagcatgctgaagccctcatcactggttgtggttcatccattggcaaaaccaggagcagatccctgcttatatcaaaacggaggctgtgaacatatttgcaaaaagaggcttggaactgcttggtgttcgtgtcgtgaaggttttatgaaagcctcagatgggaaaacgtgtctggctctggatggtcatcagctgttggcaggtggtgaagttgatctaaagaaccaagtaacaccattggacatcttgtccaagactagagtgtcagaagataacattacagaatctcaacacatgctagtggctgaaatcatggtgtcagatcaagatgactgtgctcctgtgggatgcagcatgtatgctcggtgtatttcagagggagaggatgccacatgtcagtgtttgaaaggatttgctggggatggaaaactatgttctgatatagatgaatgtgagatgggtgtcccagtgtgcccccctgcctcctccaagtgcatcaacaccgaaggtggttatgtctgccggtgctcagaaggctaccaaggagatgggattcactgtcttgatattgatgagtgccaactgggggagcacagctgtggagagaatgccagctgcacaaatacagagggaggctatacctgcatgtgtgctggacgcctgtctgaaccaggactgatttgccctgactctactccaccccctcacctcagggaagatgaccaccactattccgtaagaaatagtgactctgaatgtcccctgtcccacgatgggtactgcctccatgatggtgtgtgcatgtatattgaagcattggacaagtatgcatgcaactgtgttgttggctacatcggggagcgatgtcagtaccgagacctgaagtggtgggaactgcgccacgctggccacgggcagcagcagaaggtcatcgtggtggctgtctgcgtggtggtgcttgtcatgctgctcctcctgagcctgtggggggcccactactacaggactcagaagctgctatcgaaaaacccaaagaatccttatgaggagtcgagcagagatgtgaggagtcgcaggcctgctgacactgaggatgggatgtcctcttgccctcaaccttggtttgtggttataaaagaacaccaagacctcaagaatgggggtcaaccagtggctggtgaggatggccaggcagcagatgggtcaatgcaaccaacttcatggaggcaggagccccagttatgtggaatgggcacagagcaaggctgctggattccagtatccagtgataagggctcctgtccccaggtaatggagcgaagctttcatatgccctcctatgggacacagacccttgaagggggtgtcgagaagccccattctctcctatcagctaacccattatggcaacaaagggccctggacccaccacaccaaatggagctgactcagtgaaaactggaattaaaaggaaagtcaagaagaatgaactatgtcgatgcacagtatcttttctttcaaaagtagagcaaaactataggttttggttccacaatctctacgactaatcacctactcaatgcctggagacagatacgtagttgtgcttttgtttgctcttttaagcagtctcactgcagtcttatttccaagtaagagtactgggagaatcactaggtaacttattagaaacccaaattgggacaacagtgctttgtaaattgtgttgtcttcagcagtcaatacaaatagatttttgtttttgttgttcctgcagccccagaagaaattaggggttaaagcagacagtcacactggtttggtcagttacaaagtaatttctttgatctggacagaacatttatatcagtttcatgaaatgattggaatattacaataccgttaagatacagtgtaggcatttaactcctcattggcgtggtccatgctgatgattttgcaaaatgagttgtgatgaatcaatgaaaaatgtaatttagaaactgatttcttcagaattagatggcttattttttaaaatatttgaatgaaaacattttatttttaaaatattacacaggaggcttcggagtttcttagtcattactgtccttttcccctacagaattttccctcttggtgtgattgcacagaatttgtatgtattttcagttacaagattgtaagtaaattgcctgatttgttttcattatagacaacgatgaatttcttctaattatttaaataaaatcaccaaaaacataaacattttattgtatgcctgattaagtagttaattatagtctaaggcagtactagagttgaaccaaaatgatttgtcaagcttgctgatgtttctgtttttcgttttttttttttttccggagagaggataggatctcactctgttatccaggctggagtgtgcaatggcacaatcatagctcagtgcagcctcaaactcctgggctcaagcaatcctcctgcctcagcctcccgagtaactaggaccacaggcacaggccaccatgcctggctaaggtttttatttttattttttgtagacatggggatcacacaatgttgcccaggctggtcttgaactcctggcctcaagcaaggtcgtgctggtaattttgcaaaatgaattgtgattgactttcagcctcccaacgtattagattataggcattagccatggtgcccagccttgtaacttttaaaaaaattttttaatctacaactctgtagattaaaatttcacatggtgttctaattaaatatttttcttgcagccaagatattgttactacagataacacaacctgatatggtaactttaaattttgggggctttgaatcattcagtttatgcattaactagtccctttgtttatctttcatttctcaaccccttgtactttggtgataccagacatcagaataaaaagaaattgaagtaaaaaaaaaaaaaaaaaa

SEQ ID NO: 75 - RNA, 5616 nt, Homo sapiens
  source 1..5616: mol_type = mRNA
ccccggcgcagcgcggccgcagcagcctccgccccccgcacggtgtgagcgcccgacgcggccgaggcggccggagtcccgagctagccccggcggccgccgccgcccagaccggacgacaggccacctcgtcggcgtccgcccgagtccccgcctcgccgccaacgccacaaccaccgcgcacggccccctgactccgtccagtattgatcgggagagccggagcgagctcttcggggagcagcgatgcgaccctccgggacggccggggcagcgctcctggcgctgctggctgcgctctgcccggcgagtcgggctctggaggaaaagaaagtttgccaaggcacgagtaacaagctcacgcagttgggcacttttgaagatcattttctcagcctccagaggatgttcaataactgtgaggtggtccttgggaatttggaaattacctatgtgcagaggaattatgatctttccttcttaaagaccatccaggaggtggctggttatgtcctcattgccctcaacacagtggagcgaattcctttggaaaacctgcagatcatcagaggaaatatgtactacgaaaattcctatgccttagcagtcttatctaactatgatgcaaataaaaccggactgaaggagctgcccatgagaaatttacaggaaatcctgcatggcgccgtgcggttcagcaacaaccctgccctgtgcaacgtggagagcatccagtggcgggacatagtcagcagtgactttctcagcaacatgtcgatggacttccagaaccacctgggcagctgccaaaagtgtgatccaagctgtcccaatgggagctgctggggtgcaggagaggagaactgccagaaactgaccaaaatcatctgtgcccagcagtgctccgggcgctgccgtggcaagtcccccagtgactgctgccacaaccagtgtgctgcaggctgcacaggcccccgggagagcgactgcctggtctgccgcaaattccgagacgaagccacgtgcaaggacacctgccccccactcatgctctacaaccccaccacgtaccagatggatgtgaaccccgagggcaaatacagctttggtgccacctgcgtgaagaagtgtccccgtaattatgtggtgacagatcacggctcgtgcgtccgagcctgtggggccgacagctatgagatggaggaagacggcgtccgcaagtgtaagaagtgcgaagggccttgccgcaaagtgtgtaacggaataggtattggtgaatttaaagactcactctccataaatgctacgaatattaaacacttcaaaaactgcacctccatcagtggcgatctccacatcctgccggtggcatttaggggtgactccttcacacatactcctcctctggatccacaggaactggatattctgaaaaccgtaaaggaaatcacagggtttttgctgattcaggcttggcctgaaaacaggacggacctccatgcctttgagaacctagaaatcatacgcggcaggaccaagcaacatggtcagttttctcttgcagtcgtcagcctgaacataacatccttgggattacgctccctcaaggagataagtgatggagatgtgataatttcaggaaacaaaaatttgtgctatgcaaatacaataaactggaaaaaactgtttgggacctccggtcagaaaaccaaaattataagcaacagaggtgaaaacagctgcaaggccacaggccaggtctgccatgccttgtgctcccccgagggctgctggggcccggagcccagggactgcgtctcttgccggaatgtcagccgaggcagggaatgcgtggacaagtgcaaccttctggagggtgagccaagggagtttgtggagaactctgagtgcatacagtgccacccagagtgcctgcctcaggccatgaacatcacctgcacaggacggggaccagacaactgtatccagtgtgcccactacattgacggcccccactgcgtcaagacctgcccggcaggagtcatgggagaaaacaacaccctggtctggaagtacgcagacgccggccatgtgtgccacctgtgccatccaaactgcacctacggatgcactgggccaggtcttgaaggctgtccaacgaatgggcctaagatcccgtccatcgccactgggatggtgggggccctcctcttgctgctggtggtggccctggggatcggcctcttcatgcgaaggcgccacatcgttcggaagcgcacgctgcggaggctgctgcaggagagggagcttgtggagcctcttacacccagtggagaagctcccaaccaagctctcttgaggatcttgaaggaaactgaattcaaaaagatcaaagtgctgggctccggtgcgttcggcacggtgtataagggactctggatcccagaaggtgagaaagttaaaattcccgtcgctatcaaggaattaagagaagcaacatctccgaaagccaacaaggaaatcctcgatgaagcctacgtgatggccagcgtggacaacccccacgtgtgccgcctgctgggcatctgcctcacctccaccgtgcagctcatcacgcagctcatgcccttcggctgcctcctggactatgtccgggaacacaaagacaatattggctcccagtacctgctcaactggtgtgtgcagatcgcaaagggcatgaactacttggaggaccgtcgcttggtgcaccgcgacctggcagccaggaacgtactggtgaaaacaccgcagcatgtcaagatcacagattttgggctggccaaactgctgggtgcggaagagaaagaataccatgcagaaggaggcaaagtgcctatcaagtggatggcattggaatcaattttacacagaatctatacccaccagagtgatgtctggagctacggggtgaccgtttgggagttgatgacctttggatccaagccatatgacggaatccctgccagcgagatctcctccatcctggagaaaggagaacgcctccctcagccacccatatgtaccatcgatgtctacatgatcatggtcaagtgctggatgatagacgcagatagtcgcccaaagttccgtgagttgatcatcgaattctccaaaatggcccgagacccccagcgctaccttgtcattcagggggatgaaagaatgcatttgccaagtcctacagactccaacttctaccgtgccctgatggatgaagaagacatggacgacgtggtggatgccgacgagtacctcatcccacagcagggcttcttcagcagcccctccacgtcacggactcccctcctgagctctctgagtgcaaccagcaacaattccaccgtggcttgcattgatagaaatgggctgcaaagctgtcccatcaaggaagacagcttcttgcagcgatacagctcagaccccacaggcgccttgactgaggacagcatagacgacaccttcctcccagtgcctgaatacataaaccagtccgttcccaaaaggcccgctggctctgtgcagaatcctgtctatcacaatcagcctctgaaccccgcgcccagcagagacccacactaccaggacccccacagcactgcagtgggcaaccccgagtatctcaacactgtccagcccacctgtgtcaacagcacattcgacagccctgcccactgggcccagaaaggcagccaccaaattagcctggacaaccctgactaccagcaggacttctttcccaaggaagccaagccaaatggcatctttaagggctccacagctgaaaatgcagaatacctaagggtcgcgccacaaagcagtgaatttattggagcatgaccacggaggatagtatgagccctaaaaatccagactctttcgatacccaggaccaagccacagcaggtcctccatcccaacagccatgcccgcattagctcttagacccacagactggttttgcaacgtttacaccgactagccaggaagtacttccacctcgggcacattttgggaagttgcattcctttgtcttcaaactgtgaagcatttacagaaacgcatccagcaagaatattgtccctttgagcagaaatttatctttcaaagaggtatatttgaaaaaaaaaaaaagtatatgtgaggatttttattgattggggatcttggagtttttcattgtcgctattgatttttacttcaatgggctcttccaacaaggaagaagcttgctggtagcacttgctaccctgagttcatccaggcccaactgtgagcaaggagcacaagccacaagtcttccagaggatgcttgattccagtggttctgcttcaaggcttccactgcaaaacactaaagatccaagaaggccttcatggccccagcaggccggatcggtactgtatcaagtcatggcaggtacagtaggataagccactctgtcccttcctgggcaaagaagaaacggaggggatggaattcttccttagacttacttttgtaaaaatgtccccacggtacttactccccactgatggaccagtggtttccagtcatgagcgttagactgacttgtttgtcttccattccattgttttgaaactcagtatgctgcccctgtcttgctgtcatgaaatcagcaagagaggatgacacatcaaataataactcggattccagcccacattggattcatcagcatttggaccaatagcccacagctgagaatgtggaatacctaaggatagcaccgcttttgttctcgcaaaaacgtatctcctaatttgaggctcagatgaaatgcatcaggtcctttggggcatagatcagaagactacaaaaatgaagctgctctgaaatctcctttagccatcaccccaaccccccaaaattagtttgtgttacttatggaagatagttttctccttttacttcacttcaaaagctttttactcaaagagtatatgttccctccaggtcagctgcccccaaaccccctccttacgctttgtcacacaaaaagtgtctctgccttgagtcatctattcaagcacttacagctctggccacaacagggcattttacaggtgcgaatgacagtagcattatgagtagtgtggaattcaggtagtaaatatgaaactagggtttgaaattgataatgctttcacaacatttgcagatgttttagaaggaaaaaagttccttcctaaaataatttctctacaattggaagattggaagattcagctagttaggagcccaccttttttcctaatctgtgtgtgccctgtaacctgactggttaacagcagtcctttgtaaacagtgttttaaactctcctagtcaatatccaccccatccaatttatcaaggaagaaatggttcagaaaatattttcagcctacagttatgttcagtcacacacacatacaaaatgttccttttgcttttaaagtaatttttgactcccagatcagtcagagcccctacagcattgttaagaaagtatttgatttttgtctcaatgaaaataaaactatattcatttccactctaaaaaaaaaaaaaaaaa

SEQ ID NO: 76 - RNA, 8761 nt, Homo sapiens
  source 1..8761: mol_type = mRNA
gccgaggaggaagaggttgatggcggcggcggagctccgagagacctcggctgggcaggggccggccgtggcgggccggggactgcgcctctagagccgcgagttctcgggaattcgccgcagcggacgcgctcggcgaatttgtgctcttgtgccctcctccgggcttgggcccaggcccggcccctcgcacttgcccttaccttttctatcgagtccgcatccctctccagccactgcgacccggcgaagagaaaaaggaacttcccccaccccctcgggtgccgtcggagccccccagcccacccctgggtgcggcgcggggaccccgggccgaagaagagatttcctgaggattctggttttcctcgcttgtatctccgaaagaattaaaaatggccgagaatgtggtggaaccggggccgccttcagccaagcggcctaaactctcatctccggccctctcggcgtccgccagcgatggcacagattttggctctctatttgacttggagcacgacttaccagatgaattaatcaactctacagaattgggactaaccaatggtggtgatattaatcagcttcagacaagtcttggcatggtacaagatgcagcttctaaacataaacagctgtcagaattgctgcgatctggtagttcccctaacctcaatatgggagttggtggcccaggtcaagtcatggccagccaggcccaacagagcagtcctggattaggtttgataaatagcatggtcaaaagcccaatgacacaggcaggcttgacttctcccaacatggggatgggcactagtggaccaaatcagggtcctacgcagtcaacaggtatgatgaacagtccagtaaatcagcctgccatgggaatgaacacagggatgaatgcgggcatgaatcctggaatgttggctgcaggcaatggacaagggataatgcctaatcaagtcatgaacggttcaattggagcaggccgagggcgacagaatatgcagtacccaaacccaggcatgggaagtgctggcaacttactgactgagcctcttcagcagggctctccccagatgggaggacaaacaggattgagaggcccccagcctcttaagatgggaatgatgaacaaccccaatccttatggttcaccatatactcagaatcctggacagcagattggagccagtggccttggtctccagattcagacaaaaactgtactatcaaataacttatctccatttgctatggacaaaaaggcagttcctggtggaggaatgcccaacatgggtcaacagccagccccgcaggtccagcagccaggcctggtgactccagttgcccaagggatgggttctggagcacatacagctgatccagagaagcgcaagctcatccagcagcagcttgttctccttttgcatgctcacaagtgccagcgccgggaacaggccaatggggaagtgaggcagtgcaaccttccccactgtcgcacaatgaagaatgtcctaaaccacatgacacactgccagtcaggcaagtcttgccaagtggcacactgtgcatcttctcgacaaatcatttcacactggaagaattgtacaagacatgattgtcctgtgtgtctccccctcaaaaatgctggtgataagagaaatcaacagccaattttgactggagcacccgttggacttggaaatcctagctctctaggggtgggtcaacagtctgcccccaacctaagcactgttagtcagattgatcccagctccatagaaagagcctatgcagctcttggactaccctatcaagtaaatcagatgccgacacaaccccaggtgcaagcaaagaaccagcagaatcagcagcctgggcagtctccccaaggcatgcggcccatgagcaacatgagtgctagtcctatgggagtaaatggaggtgtaggagttcaaacgccgagtcttctttctgactcaatgttgcattcagccataaattctcaaaacccaatgatgagtgaaaatgccagtgtgccctccctgggtcctatgccaacagcagctcaaccatccactactggaattcggaaacagtggcacgaagatattactcaggatcttcgaaatcatcttgttcacaaactcgtccaagccatatttcctacgccggatcctgctgctttaaaagacagacggatggaaaacctagttgcatatgctcggaaagttgaaggggacatgtatgaatctgcaaacaatcgagcggaatactaccaccttctagctgagaaaatctataagatccagaaagaactagaagaaaaacgaaggaccagactacagaagcagaacatgctaccaaatgctgcaggcatggttccagtttccatgaatccagggcctaacatgggacagccgcaaccaggaatgacttctaatggccctctacctgacccaagtatgatccgtggcagtgtgccaaaccagatgatgcctcgaataactccacaatctggtttgaatcaatttggccagatgagcatggcccagccccctattgtaccccggcaaacccctcctcttcagcaccatggacagttggctcaacctggagctctcaacccgcctatgggctatgggcctcgtatgcaacagccttccaaccagggccagttccttcctcagactcagttcccatcacagggaatgaatgtaacaaatatccctttggctccgtccagcggtcaagctccagtgtctcaagcacaaatgtctagttcttcctgcccggtgaactctcctataatgcctccagggtctcaggggagccacattcactgtccccagcttcctcaaccagctcttcatcagaattcaccctcgcctgtacctagtcgtacccccacccctcaccatactcccccaagcataggggctcagcagccaccagcaacaacaattccagcccctgttcctacacctcctgccatgccacctgggccacagtcccaggctctacatccccctccaaggcagacacctacaccaccaacaacacaacttccccaacaagtgcagccttcacttcctgctgcaccttctgctgaccagccccagcagcagcctcgctcacagcagagcacagcagcgtctgttcctaccccaacagcaccgctgcttcctccgcagcctgcaactccactttcccagccagctgtaagcattgaaggacaggtatcaaatcctccatctactagtagcacagaagtgaattctcaggccattgctgagaagcagccttcccaggaagtgaagatggaggccaaaatggaagtggatcaaccagaaccagcagatactcagccggaggatatttcagagtctaaagtggaagactgtaaaatggaatctaccgaaacagaagagagaagcactgagttaaaaactgaaataaaagaggaggaagaccagccaagtacttcagctacccagtcatctccggctccaggacagtcaaagaaaaagattttcaaaccagaagaactacgacaggcactgatgccaactttggaggcactttaccgtcaggatccagaatcccttccctttcgtcaacctgtggaccctcagcttttaggaatccctgattactttgatattgtgaagagccccatggatctttctaccattaagaggaagttagacactggacagtatcaggagccctggcagtatgtcgatgatatttggcttatgttcaataatgcctggttatataaccggaaaacatcacgggtatacaaatactgctccaagctctctgaggtctttgaacaagaaattgacccagtgatgcaaagccttggatactgttgtggcagaaagttggagttctctccacagacactgtgttgctacggcaaacagttgtgcacaatacctcgtgatgccacttattacagttaccagaacaggtatcatttctgtgagaagtgtttcaatgagatccaaggggagagcgtttctttgggggatgacccttcccagcctcaaactacaataaataaagaacaattttccaagagaaaaaatgacacactggatcctgaactgtttgttgaatgtacagagtgcggaagaaagatgcatcagatctgtgtccttcaccatgagatcatctggcctgctggattcgtctgtgatggctgtttaaagaaaagtgcacgaactaggaaagaaaataagttttctgctaaaaggttgccatctaccagacttggcacctttctagagaatcgtgtgaatgactttctgaggcgacagaatcaccctgagtcaggagaggtcactgttagagtagttcatgcttctgacaaaaccgtggaagtaaaaccaggcatgaaagcaaggtttgtggacagtggagagatggcagaatcctttccataccgaaccaaagccctctttgcctttgaagaaattgatggtgttgacctgtgcttctttggcatgcatgttcaagagtatggctctgactgccctccacccaaccagaggagagtatacatatcttacctcgatagtgttcatttcttccgtcctaaatgcttgaggactgcagtctatcatgaaatcctaattggatatttagaatatgtcaagaaattaggttacacaacagggcatatttgggcatgtccaccaagtgagggagatgattatatcttccattgccatcctcctgaccagaagatacccaagcccaagcgactgcaggaatggtacaaaaaaatgcttgacaaggctgtatcagagcgtattgtccatgactacaaggatatttttaaacaagctactgaagatagattaacaagtgcaaaggaattgccttatttcgagggtgatttctggcccaatgttctggaagaaagcattaaggaactggaacaggaggaagaagagagaaaacgagaggaaaacaccagcaatgaaagcacagatgtgaccaagggagacagcaaaaatgctaaaaagaagaataataagaaaaccagcaaaaataagagcagcctgagtaggggcaacaagaagaaacccgggatgcccaatgtatctaacgacctctcacagaaactatatgccaccatggagaagcataaagaggtcttctttgtgatccgcctcattgctggccctgctgccaactccctgcctcccattgttgatcctgatcctctcatcccctgcgatctgatggatggtcgggatgcgtttctcacgctggcaagggacaagcacctggagttctcttcactccgaagagcccagtggtccaccatgtgcatgctggtggagctgcacacgcagagccaggaccgctttgtctacacctgcaatgaatgcaagcaccatgtggagacacgctggcactgtactgtctgtgaggattatgacttgtgtatcacctgctataacactaaaaaccatgaccacaaaatggagaaactaggccttggcttagatgatgagagcaacaaccagcaggctgcagccacccagagcccaggcgattctcgccgcctgagtatccagcgctgcatccagtctctggtccatgcttgccagtgtcggaatgccaattgctcactgccatcctgccagaagatgaagcgggttgtgcagcataccaagggttgcaaacggaaaaccaatggcgggtgccccatctgcaagcagctcattgccctctgctgctaccatgccaagcactgccaggagaacaaatgcccggtgccgttctgcctaaacatcaagcagaagctccggcagcaacagctgcagcaccgactacagcaggcccaaatgcttcgcaggaggatggccagcatgcagcggactggtgtggttgggcagcaacagggcctcccttcccccactcctgccactccaacgacaccaactggccaacagccaaccaccccgcagacgccccagcccacttctcagcctcagcctacccctcccaatagcatgccaccctacttgcccaggactcaagctgctggccctgtgtcccagggtaaggcagcaggccaggtgacccctccaacccctcctcagactgctcagccaccccttccagggcccccacctgcagcagtggaaatggcaatgcagattcagagagcagcggagacgcagcgccagatggcccacgtgcaaatttttcaaaggccaatccaacaccagatgcccccgatgactcccatggcccccatgggtatgaacccacctcccatgaccagaggtcccagtgggcatttggagccagggatgggaccgacagggatgcagcaacagccaccctggagccaaggaggattgcctcagccccagcaactacagtctgggatgccaaggccagccatgatgtcagtggcccagcatggtcaacctttgaacatggctccacaaccaggattgggccaggtaggtatcagcccactcaaaccaggcactgtgtctcaacaagccttacaaaaccttttgcggactctcaggtctcccagctctcccctgcagcagcaacaggtgcttagtatccttcacgccaacccccagctgttggctgcattcatcaagcagcgggctgccaagtatgccaactctaatccacaacccatccctgggcagcctggcatgccccaggggcagccagggctacagccacctaccatgccaggtcagcagggggtccactccaatccagccatgcagaacatgaatccaatgcaggcgggcgttcagagggctggcctgccccagcagcaaccacagcagcaactccagccacccatgggagggatgagcccccaggctcagcagatgaacatgaaccacaacaccatgccttcacaattccgagacatcttgagacgacagcaaatgatgcaacagcagcagcaacagggagcagggccaggaataggccctggaatggccaaccataaccagttccagcaaccccaaggagttggctacccaccacagcagcagcagcggatgcagcatcacatgcaacagatgcaacaaggaaatatgggacagataggccagcttccccaggccttgggagcagaggcaggtgccagtctacaggcctatcagcagcgactccttcagcaacagatggggtcccctgttcagcccaaccccatgagcccccagcagcatatgctcccaaatcaggcccagtccccacacctacaaggccagcagatccctaattctctctccaatcaagtgcgctctccccagcctgtcccttctccacggccacagtcccagcccccccactccagtccttccccaaggatgcagcctcagccttctccacaccacgtttccccacagacaagttccccacatcctggactggtagctgcccaggccaaccccatggaacaagggcattttgccagcccggaccagaattcaatgctttctcagcttgctagcaatccaggcatggcaaacctccatggtgcaagcgccacggacctgggactcagcaccgataactcagacttgaattcaaacctctcacagagtacactagacatacactagagacaccttgtagtattttgggagcaaaaaaattattttctcttaacaagactttttgtactgaaaacaatttttttgaatctttcgtagcctaaaagacaattttccttggaacacataagaactgtgcagtagccgtttgtggtttaaagcaaacatgcaagatgaacctgagggatgatagaatacaaagaatatatttttgttatggctggttaccaccagcctttcttcccctttgtgtgtgtggttcaagtgtgcactgggaggaggctgaggcctgtgaagccaaacaatatgctcctgccttgcacctccaataggttttattattttttttaaattaatgaacatatgtaatattaatagttattatttactggtgcagatggttgacatttttccctattttcctcactttatggaagagttaaaacatttctaaaccagaggacaaaaggggttaatgttactttaaaattacattctatatatatataaatatatataaatatatattaaaataccagttttttttctctgggtgcaaagatgttcattcttttaaaaaatgtttaaaaaaaaaaaaaaactgcctttcttcccctcaagtcaacttttgtgctccagaaaattttctattctgtaagtctgagcgtaaaacttcaagtattaaaataatttgtacatgtagagagaaaaatgactttttcaaaaatatacaggggcagctgccaaattgatgtattatatattgtggtttctgtttcttgaaagaatttttttcgttatttttacatctaacaaagtaaaaaaattaaaaagagggtaagaaacgattccggtgggatgattttaacatgcaaaatgtccctgggggtttcttctttgcttgctttcttcctccttaccctaccccccactcacacacacacacacacacacacacacacacacacacacacactttctataaaacttgaaaatagcaaaaaccctcaactgttgtaaatcatgcaattaaagttgattacttataaatatgaactttggatcactgtatagactgttaaatttgatttcttattacctattgttaaataaactgtgtgagacagaca

SEQ ID NO: 77 - RNA, 1855 nt, Homo sapiens
  source 1..1855: mol_type = mRNA
gacgatacgccgggcgcaggcgcagaagccgcgcccgtccgcggcgccgccagccagggcggaaacggctgcggcttcgctagggacgcatgcgcgggtcccttagttttcgcgagataacggtcgaaaacgcgctcttgtcgatttcctgtagtgaatcaggcaccggagtgcaggttcgggggtggaatccttgggccgctgggcaagcggcgagacctggccagggccagcgagccgaggacagagggcgcacggagggccgggccgcagccccggccgcttgcagaccccgccatggacccgttcctggtgctgctgcactcggtgtcgtccagcctgtcgagcagcgagctgaccgagctcaagttcctatgcctcgggcgcgtgggcaagcgcaagctggagcgcgtgcagagcggcctagacctcttctccatgctgctggagcagaacgacctggagcccgggcacaccgagctcctgcgcgagctgctcgcctccctgcggcgccacgacctgctgcggcgcgtcgacgacttcgaggcgggggcggcggccggggccgcgcctggggaagaagacctgtgtgcagcatttaacgtcatatgtgataatgtggggaaagattggagaaggctggctcgtcagctcaaagtctcagacaccaagatcgacagcatcgaggacagatacccccgcaacctgacagagcgtgtgcgggagtcactgagaatctggaagaacacagagaaggagaacgcaacagtggcccacctggtgggggctctcaggtcctgccagatgaacctggtggctgacctggtacaagaggttcagcaggcccgtgacctccagaacaggagtggggccatgtccccgatgtcatggaactcagacgcatctacctccgaagcgtcctgatgggccgctgctttgcgctggtggaccacaggcatctacacagcctggactttggttctctccaggaaggtagcccagcactgtgaagacccagcaggaagccaggctgagtgagccacagaccacctgcttctgaactcaagctgcgtttattaatgcctctcccgcaccaggccgggcttgggccctgcacagatatttccatttcttcctcactatgacactgagcaagatcttgtctccactaaatgagctcctgcgggagtagttggaaagttggaaccgtgtccagcacagaaggaatctgtgcagatgagcagtcacactgttactccacagcggaggagaccagctcagaggcccaggaatcggagcgaagcagagaggtggagaactgggatttgaacccccgccatccttcaccagagcccatgctcaaccactgtggcgttctgctgcccctgcagttggcagaaaggatgttttgtcccatttccttggaggccaccgggacagacctggacactagggtcaggcggggtgctgtggtggggagaggcatggctggggtgggggtggggagacctggttggccgtggtccagctcttggcccctgtgtgagttgagtctcctctctgagactgctaagtaggggcagtgatggttgccaggacgaattgagataatatctgtgaggtgctgatgagtgattgacacacagcactctctaaatcttccttgtgaggattatgggtcctgcaattctacagtttcttactgttttgtatcaaaatcactatctttctgataacagaattgccaaggcagcgggatctcgtatctttaaaaagcagtcctcttattcctaaggtaatcctattaaaacacagctttacaacttccatactacaaaaaattttctattcctaa

SEQ ID NO: 78 - RNA, 7123 nt, Homo sapiens
  source 1..7123: mol_type = mRNA
atcgaggtccgcgggaggctcggagcgcgccaggcggacactcctctcggctcctccccggcagcggcggcggctcggagcgggctccggggctcgggtgcagcggccagcgggcgcctggcggcgaggattacccggggaagtggttgtctcctggctggagccgcgagacgggcgctcagggcgcggggccggcggcggcgaacgagaggacggactctggcggccgggtcgttggccgcggggagcgcgggcaccgggcgagcaggccgcgtcgcgctcaccatggtcagctactgggacaccggggtcctgctgtgcgcgctgctcagctgtctgcttctcacaggatctagttcaggttcaaaattaaaagatcctgaactgagtttaaaaggcacccagcacatcatgcaagcaggccagacactgcatctccaatgcaggggggaagcagcccataaatggtctttgcctgaaatggtgagtaaggaaagcgaaaggctgagcataactaaatctgcctgtggaagaaatggcaaacaattctgcagtactttaaccttgaacacagctcaagcaaaccacactggcttctacagctgcaaatatctagctgtacctacttcaaagaagaaggaaacagaatctgcaatctatatatttattagtgatacaggtagacctttcgtagagatgtacagtgaaatccccgaaattatacacatgactgaaggaagggagctcgtcattccctgccgggttacgtcacctaacatcactgttactttaaaaaagtttccacttgacactttgatccctgatggaaaacgcataatctgggacagtagaaagggcttcatcatatcaaatgcaacgtacaaagaaatagggcttctgacctgtgaagcaacagtcaatgggcatttgtataagacaaactatctcacacatcgacaaaccaatacaatcatagatgtccaaataagcacaccacgcccagtcaaattacttagaggccatactcttgtcctcaattgtactgctaccactcccttgaacacgagagttcaaatgacctggagttaccctgatgaaaaaaataagagagcttccgtaaggcgacgaattgaccaaagcaattcccatgccaacatattctacagtgttcttactattgacaaaatgcagaacaaagacaaaggactttatacttgtcgtgtaaggagtggaccatcattcaaatctgttaacacctcagtgcatatatatgataaagcattcatcactgtgaaacatcgaaaacagcaggtgcttgaaaccgtagctggcaagcggtcttaccggctctctatgaaagtgaaggcatttccctcgccggaagttgtatggttaaaagatgggttacctgcgactgagaaatctgctcgctatttgactcgtggctactcgttaattatcaaggacgtaactgaagaggatgcagggaattatacaatcttgctgagcataaaacagtcaaatgtgtttaaaaacctcactgccactctaattgtcaatgtgaaaccccagatttacgaaaaggccgtgtcatcgtttccagacccggctctctacccactgggcagcagacaaatcctgacttgtaccgcatatggtatccctcaacctacaatcaagtggttctggcacccctgtaaccataatcattccgaagcaaggtgtgacttttgttccaataatgaagagtcctttatcctggatgctgacagcaacatgggaaacagaattgagagcatcactcagcgcatggcaataatagaaggaaagaataagatggctagcaccttggttgtggctgactctagaatttctggaatctacatttgcatagcttccaataaagttgggactgtgggaagaaacataagcttttatatcacagatgtgccaaatgggtttcatgttaacttggaaaaaatgccgacggaaggagaggacctgaaactgtcttgcacagttaacaagttcttatacagagacgttacttggattttactgcggacagttaataacagaacaatgcactacagtattagcaagcaaaaaatggccatcactaaggagcactccatcactcttaatcttaccatcatgaatgtttccctgcaagattcaggcacctatgcctgcagagccaggaatgtatacacaggggaagaaatcctccagaagaaagaaattacaatcagagatcaggaagcaccatacctcctgcgaaacctcagtgatcacacagtggccatcagcagttccaccactttagactgtcatgctaatggtgtccccgagcctcagatcacttggtttaaaaacaaccacaaaatacaacaagagcctggaattattttaggaccaggaagcagcacgctgtttattgaaagagtcacagaagaggatgaaggtgtctatcactgcaaagccaccaaccagaagggctctgtggaaagttcagcatacctcactgttcaaggaacctcggacaagtctaatctggagctgatcactctaacatgcacctgtgtggctgcgactctcttctggctcctattaaccctctttatccgaaaaatgaaaaggtcttcttctgaaataaagactgactacctatcaattataatggacccagatgaagttcctttggatgagcagtgtgagcggctcccttatgatgccagcaagtgggagtttgcccgggagagacttaaactgggcaaatcacttggaagaggggcttttggaaaagtggttcaagcatcagcatttggcattaagaaatcacctacgtgccggactgtggctgtgaaaatgctgaaagagggggccacggccagcgagtacaaagctctgatgactgagctaaaaatcttgacccacattggccaccatctgaacgtggttaacctgctgggagcctgcaccaagcaaggagggcctctgatggtgattgttgaatactgcaaatatggaaatctctccaactacctcaagagcaaacgtgacttattttttctcaacaaggatgcagcactacacatggagcctaagaaagaaaaaatggagccaggcctggaacaaggcaagaaaccaagactagatagcgtcaccagcagcgaaagctttgcgagctccggctttcaggaagataaaagtctgagtgatgttgaggaagaggaggattctgacggtttctacaaggagcccatcactatggaagatctgatttcttacagttttcaagtggccagaggcatggagttcctgtcttccagaaagtgcattcatcgggacctggcagcgagaaacattcttttatctgagaacaacgtggtgaagatttgtgattttggccttgcccgggatatttataagaaccccgattatgtgagaaaaggagatactcgacttcctctgaaatggatggctcctgaatctatctttgacaaaatctacagcaccaagagcgacgtgtggtcttacggagtattgctgtgggaaatcttctccttaggtgggtctccatacccaggagtacaaatggatgaggacttttgcagtcgcctgagggaaggcatgaggatgagagctcctgagtactctactcctgaaatctatcagatcatgctggactgctggcacagagacccaaaagaaaggccaagatttgcagaacttgtggaaaaactaggtgatttgcttcaagcaaatgtacaacaggatggtaaagactacatcccaatcaatgccatactgacaggaaatagtgggtttacatactcaactcctgccttctctgaggacttcttcaaggaaagtatttcagctccgaagtttaattcaggaagctctgatgatgtcagatacgtaaatgctttcaagttcatgagcctggaaagaatcaaaacctttgaagaacttttaccgaatgccacctccatgtttgatgactaccagggcgacagcagcactctgttggcctctcccatgctgaagcgcttcacctggactgacagcaaacccaaggcctcgctcaagattgacttgagagtaaccagtaaaagtaaggagtcggggctgtctgatgtcagcaggcccagtttctgccattccagctgtgggcacgtcagcgaaggcaagcgcaggttcacctacgaccacgctgagctggaaaggaaaatcgcgtgctgctccccgcccccagactacaactcggtggtcctgtactccaccccacccatctagagtttgacacgaagccttatttctagaagcacatgtgtatttatacccccaggaaactagcttttgccagtattatgcatatataagtttacacctttatctttccatgggagccagctgctttttgtgatttttttaatagtgcttttttttttttgactaacaagaatgtaactccagatagagaaatagtgacaagtgaagaacactactgctaaatcctcatgttactcagtgttagagaaatccttcctaaacccaatgacttccctgctccaacccccgccacctcagggcacgcaggaccagtttgattgaggagctgcactgatcacccaatgcatcacgtaccccactgggccagccctgcagcccaaaacccagggcaacaagcccgttagccccagggatcactggctggcctgagcaacatctcgggagtcctctagcaggcctaagacatgtgaggaggaaaaggaaaaaaagcaaaaagcaagggagaaaagagaaaccgggagaaggcatgagaaagaatttgagacgcaccatgtgggcacggagggggacggggctcagcaatgccatttcagtggcttcccagctctgacccttctacatttgagggcccagccaggagcagatggacagcgatgaggggacattttctggattctgggaggcaagaaaaggacaaatatcttttttggaactaaagcaaattttagaactttacctatggaagtggttctatgtccattctcattcgtggcatgttttgatttgtagcactgagggtggcactcaactctgagcccatacttttggctcctctagtaagatgcactgaaaacttagccagagttaggttgtctccaggccatgatggccttacactgaaaatgtcacattctattttgggtattaatatatagtccagacacttaactcaatttcttggtattattctgttttgcacagttagttgtgaaagaaagctgagaagaatgaaaatgcagtcctgaggagaggagttttctccatatcaaaacgagggctgatggaggaaaaaggtcaataaggtcaagggaaaaccccgtctctataccaaccaaaccaattcaccaacacagttgggacccaaaacacaggaagtcagtcacgtttccttttcatttaatggggattccactatctcacactaatctgaaaggatgtggaagagcattagctggcgcatattaagcactttaagctccttgagtaaaaaggtggtatgtaatttatgcaaggtatttctccagttgggactcaggatattagttaatgagccatcactagaagaaaagcccattttcaactgctttgaaacttgcctggggtctgagcatgatgggaatagggagacagggtaggaaagggcgcctactcttcagggtctaaagatcaagtgggccttggatcgctaagctggctctgtttgatgctatttatgcaagttagggtctatgtatttatgatgtctgcaccttctgcagccagtcagaagctggagaggcaacagtggattgctgcttcttggggagaagagtatgcttccttttatccatgtaatttaactgtagaacctgagctctaagtaaccgaagaatgtatgcctctgttcttatgtgccacatccttgtttaaaggctctctgtatgaagagatgggaccgtcatcagcacattccctagtgagcctactggctcctggcagcggcttttgtggaagactcactagccagaagagaggagtgggacagtcctctccaccaagatctaaatccaaacaaaagcaggctagagccagaagagaggacaaatctttgttcttcctcttctttacatacgcaaaccacctgtgacagctggcaattttataaatcaggtaactggaaggaggttaaacacagaaaaaagaagacctcagtcaattctctacttttttttttttttccaaatcagataatagcccagcaaatagtgataacaaataaaaccttagctattcatgtcttgatttcaataattaattcttaatcattaagagaccataataaatactccttttcaagagaaaagcaaaaccattagaattgttactcagctccttcaaactcaggtttgtagcatacatgagtccatccatcagtcaaagaatggttccatctggagtcttaatgtagaaagaaaaatggagacttgtaataatgagctagttacaaagtgcttgttcattaaaatagcactgaaaattgaaacatgaattaactgataatattccaatcatttgccatttatgacaaaaatggttggcactaacaaagaacgagcacttcctttcagagtttctgagataatgtacgtggaacagtctgggtggaatggggctgaaaccatgtgcaagtctgtgtcttgtcagtccaagaagtgacaccgagatgttaattttagggacccgtgccttgtttcctagcccacaagaatgcaaacatcaaacagatactcgctagcctcatttaaattgattaaaggaggagtgcatctttggccgacagtggtgtaactgtatgtgtgtgtgtgtgtgtgtgtgtgtgtgtgtgtgtgggtgtatgtgtgttttgtgcataactatttaaggaaactggaattttaaagttacttttatacaaaccaagaatatatgctacagatataagacagacatggtttggtcctatatttctagtcatgatgaatgtattttgtataccatcttcatataataaacttccaaaaacaca

SEQ ID NO: 79 - RNA, 3851 nt, Homo sapiens
  source 1..3851: mol_type = mRNA
ctctcccaaccgcctcgtcgcactcctcaggctgagagcaccgctgcactcgcggccggcgatgcgggaccccggcgcggccgctccgctttcgtccctgggcctctgtgccctggtgctggcgctgctgggcgcactgtccgcgggcgccggggcgcagccgtaccacggagagaagggcatctccgtgccggaccacggcttctgccagcccatctccatcccgctgtgcacggacatcgcctacaaccagaccatcctgcccaacctgctgggccacacgaaccaagaggacgcgggcctcgaggtgcaccagttctacccgctggtgaaggtgcagtgttctcccgaactccgctttttcttatgctccatgtatgcgcccgtgtgcaccgtgctcgatcaggccatcccgccgtgtcgttctctgtgcgagcgcgcccgccagggctgcgaggcgctcatgaacaagttcggcttccagtggcccgagcggctgcgctgcgagaacttcccggtgcacggtgcgggcgagatctgcgtgggccagaacacgtcggacggctccgggggcccaggcggcggccccactgcctaccctaccgcgccctacctgccggacctgcccttcaccgcgctgcccccgggggcctcagatggcagggggcgtcccgccttccccttctcatgcccccgtcagctcaaggtgcccccgtacctgggctaccgcttcctgggtgagcgcgattgtggcgccccgtgcgaaccgggccgtgccaacggcctgatgtactttaaggaggaggagaggcgcttcgcccgcctctgggtgggcgtgtggtccgtgctgtgctgcgcctcgacgctctttaccgttctcacctacctggtggacatgcggcgcttcagctacccagagcggcccatcatcttcctgtcgggctgctacttcatggtggccgtggcgcacgtggccggcttccttctagaggaccgcgccgtgtgcgtggagcgcttctcggacgatggctaccgcacggtggcgcagggcaccaagaaggagggctgcaccatcctcttcatggtgctctacttcttcggcatggccagctccatctggtgggtcattctgtctctcacttggttcctggcggccggcatgaagtggggccacgaggccatcgaggccaactcgcagtacttccacctggccgcgtgggccgtgcccgccgtcaagaccatcactatcctggccatgggccaggtagacggggacctgctgagcggggtgtgctacgttggcctctccagtgtggacgcgctgcggggcttcgtgctggcgcctctgttcgtctacctcttcataggcacgtccttcttgctggccggcttcgtgtccctcttccgtatccgcaccatcatgaaacacgacggcaccaagaccgagaagctggagaagctcatggtgcgcatcggcgtcttcagcgtgctctacacagtgcccgccaccatcgtcctggcctgctacttctacgagcaggccttccgcgagcactgggagcgcacctggctcctgcagacgtgcaagagctatgccgtgccctgcccgcccggccacttcccgcccatgagccccgacttcaccgtcttcatgatcaagtacctgatgaccatgatcgtcggcatcaccactggcttctggatctggtcgggcaagaccctgcagtcgtggcgccgcttctaccacagacttagccacagcagcaagggggagactgcggtatgagccccggcccctccccacctttcccaccccagccctcttgcaagaggagaggcacggtagggaaaagaactgctgggtgggggcctgtttctgtaactttctccccctctactgagaagtgacctggaagtgagaagttctttgcagatttggggcgaggggtgatttggaaaagaagacctgggtggaaagcggtttggatgaaaagatttcaggcaaagacttgcaggaagatgatgataacggcgatgtgaatcgtcaaaggtacgggccagcttgtgcctaatagaaggttgagaccagcagagactgctgtgagtttctcccggctccgaggctgaacggggactgtgagcgatccccctgctgcagggcgagtggcctgtccagacccctgtgaggccccgggaaaggtacagccctgtctgcggtggctgctttgttggaaagagggagggcctcctgcggtgtgcttgtcaagcagtggtcaaaccataatctcttttcactggggccaaactggagcccagatgggttaatttccagggtcagacattacggtctctcctcccctgccccctcccgcctgtttttcctcccgtactgctttcaggtcttgtaaaataagcatttggaagtcttgggaggcctgcctgctagaatcctaatgtgaggatgcaaaagaaatgatgataacattttgagataaggccaaggagacgtggagtaggtatttttgctactttttcattttctggggaaggcaggaggcagaaagacgggtgttttatttggtctaataccctgaaaagaagtgatgacttgttgcttttcaaaacaggaatgcatttttccccttgtctttgttgtaagagacaaaagaggaaacaaaagtgtctccctgtggaaaggcataactgtgacgaaagcaacttttataggcaaagcagcgcaaatctgaggtttcccgttggttgttaatttggttgagataaacattcctttttaaggaaaagtgaagagcagtgtgctgtcacacaccgttaagccagaggttctgacttcgctaaaggaaatgtaagaggttttgttgtctgttttaaataaatttaattcggaacacatgatccaacagactatgttaaaatattcagggaaatctctcccttcatttactttttcttgctataagcctatatttaggtttcttttctatttttttctcccatttggatcctttgaggtaaaaaaacataatgtcttcagcctcataataaaggaaagttaattaaaaaaaaaaagcaaagagccattttgtcctgttttcttggttccatcaatctgtttattaaacatcatccatatgctgaccctgtctctgtgtggttgggttgggaggcgatcagcagataccatagtgaacgaagaggaaggtttgaaccatgggccccatctttaaagaaagtcattaaaagaaggtaaacttcaaagtgattctggagttctttgaaatgtgctggaagacttaaatttattaatcttaaatcatgtactttttttctgtaatagaactcggattcttttgcatgatggggtaaagcttagcagagaatcatgggagctaacctttatcccacctttgacactaccctccaatcttgcaacactatcctgtttctcagaacagtttttaaatgccaatcatagagggtactgtaaagtgtacaagttactttatatatgtaatgttcacttgagtggaactgctttttacattaaagttaaaatcgatcttgtgtttcttcaaccttcaaaactatctcatctgtcagatttttaaaactccaacacaggttttggcatcttttgtgctgtatcttttaagtgcatgtgaaatttgtaaaatagagataagtacagtatgtatattttgtaaatctcccatttttgtaagaaaatatatattgtatttatacatttttactttggatttttgttttgttggctttaaaggtctaccccactttatcacatgtacagatcacaaataaatttttttaaatac

SEQ ID NO: 80 - RNA, 986 nt, Homo sapiens
  source 1..986: mol_type = mRNA
tgggaaagagggaaaggcttccccggccagctgcgcggcgactccggggactccagggcgcccctctgcggccgacgcccggggtgcagcggccgccggggctggggccggcgggagtccgcgggaccctccagaagagcggccggcgccgtgactcagcactggggcggagcggggcgggaccacccttataaggctcggaggccgcgaggccttcgctggagtttcgccgccgcagtcttcgccaccatgccgccctacaccgtggtctatttcccagttcgaggccgctgcgcggccctgcgcatgctgctggcagatcagggccagagctggaaggaggaggtggtgaccgtggagacgtggcaggagggctcactcaaagcctcctgcctatacgggcagctccccaagttccaggacggagacctcaccctgtaccagtccaataccatcctgcgtcacctgggccgcacccttgggctctatgggaaggaccagcaggaggcagccctggtggacatggtgaatgacggcgtggaggacctccgctgcaaatacatctccctcatctacaccaactatgaggcgggcaaggatgactatgtgaaggcactgcccgggcaactgaagccttttgagaccctgctgtcccagaaccagggaggcaagaccttcattgtgggagaccagatctccttcgctgactacaacctgctggacttgctgctgatccatgaggtcctagcccctggctgcctggatgcgttccccctgctctcagcatatgtggggcgcctcagtgcccggcccaagctcaaggccttcctggcctcccctgagtacgtgaacctccccatcaatggcaacgggaaacagtgagggttggggggactctgagcgggaggcagagtttgccttcctttctccaggaccaataaaatttctaagagagctaaaaaaaaaaaaaaaaaaaaaaaaaaaaa

SEQ ID NO: 81 - RNA, 2820 nt, Homo sapiens
  source 1..2820: mol_type = mRNA
gggagttcagacctagatctttccagttaatcacacaacaaacttagctcatcgcaataaaaagcagctcagagccgactggctcttttaggcactgactccgaacaggattctttcacccaggcatctcctccagagggatccgccagcccgtccagcagcaccatgtgggtgaccaaactcctgccagccctgctgctgcagcatgtcctcctgcatctcctcctgctccccatcgccatcccctatgcagagggacaaaggaaaagaagaaatacaattcatgaattcaaaaaatcagcaaagactaccctaatcaaaatagatccagcactgaagataaaaaccaaaaaagtgaatactgcagaccaatgtgctaatagatgtactaggaataaaggacttccattcacttgcaaggcttttgtttttgataaagcaagaaaacaatgcctctggttccccttcaatagcatgtcaagtggagtgaaaaaagaatttggccatgaatttgacctctatgaaaacaaagactacattagaaactgcatcattggtaaaggacgcagctacaagggaacagtatctatcactaagagtggcatcaaatgtcagccctggagttccatgataccacacgaacacagctttttgccttcgagctatcggggtaaagacctacaggaaaactactgtcgaaatcctcgaggggaagaagggggaccctggtgtttcacaagcaatccagaggtacgctacgaagtctgtgacattcctcagtgttcagaagttgaatgcatgacctgcaatggggagagttatcgaggtctcatggatcatacagaatcaggcaagatttgtcagcgctgggatcatcagacaccacaccggcacaaattcttgcctgaaagatatcccgacaagggctttgatgataattattgccgcaatcccgatggccagccgaggccatggtgctatactcttgaccctcacacccgctgggagtactgtgcaattaaaacatgcgctgacaatactatgaatgacactgatgttcctttggaaacaactgaatgcatccaaggtcaaggagaaggctacaggggcactgtcaataccatttggaatggaattccatgtcagcgttgggattctcagtatcctcacgagcatgacatgactcctgaaaatttcaagtgcaaggacctacgagaaaattactgccgaaatccagatgggtctgaatcaccctggtgttttaccactgatccaaacatccgagttggctactgctcccaaattccaaactgtgatatgtcacatggacaagattgttatcgtgggaatggcaaaaattatatgggcaacttatcccaaacaagatctggactaacatgttcaatgtgggacaagaacatggaagacttacatcgtcatatcttctgggaaccagatgcaagtaagctgaatgagaattactgccgaaatccagatgatgatgctcatggaccctggtgctacacgggaaatccactcattccttgggattattgccctatttctcgttgtgaaggtgataccacacctacaatagtcaatttagaccatcccgtaatatcttgtgccaaaacgaaacaattgcgagttgtaaatgggattccaacacgaacaaacataggatggatggttagtttgagatacagaaataaacatatctgcggaggatcattgataaaggagagttgggttcttactgcacgacagtgtttcccttctcgagacttgaaagattatgaagcttggcttggaattcatgatgtccacggaagaggagatgagaaatgcaaacaggttctcaatgtttcccagctggtatatggccctgaaggatcagatctggttttaatgaagcttgccaggcctgctgtcctggatgattttgttagtacgattgatttacctaattatggatgcacaattcctgaaaagaccagttgcagtgtttatggctggggctacactggattgatcaactatgatggcctattacgagtggcacatctctatataatgggaaatgagaaatgcagccagcatcatcgagggaaggtgactctgaatgagtctgaaatatgtgctggggctgaaaagattggatcaggaccatgtgagggggattatggtggcccacttgtttgtgagcaacataaaatgagaatggttcttggtgtcattgttcctggtcgtggatgtgccattccaaatcgtcctggtatttttgtccgagtagcatattatgcaaaatggatacacaaaattattttaacatataaggtaccacagtcatagctgaagtaagtgtgtctgaagcacccaccaatacaactgtcttttacatgaagatttcagagaatgtggaatttaaaatgtcacttacaacaatcctaagacaactactggagagtcatgtttgttgaaattctcattaatgtttatgggtgttttctgttgttttgtttgtcagtgttattttgtcaatgttgaagtgaattaaggtacatgcaagtgtaataacatatctcctgaagatacttgaatggattaaaaaaacacacaggtatatttgctggatgataaagatttcatgggaaaaaaaatcaattaatctgtctaagctgctttctgatgttggtttcttaataatgagtaaaccacaaattaaatgttattttaacctcaccaaaacaatttataccttgtgtccctaaattgtagccctatattaaattatattacatttcaaaaaaaaaaaaaaaa

SEQ ID NO: 82 - RNA, 1251 nt, Homo sapiens
  source 1..1251: mol_type = mRNA
tgccctgcgcccgcaacccgagccgcacccgccgcggacggagcccatgcgcggggcgaaccgcgcgcccccgcccccgccccgccccggcctcggccccggccctggccccgggggcagtcgcgcctgtgaacggtggggcaggagaccctgtaggaggaccccgggccgcaggcccctgaggagcgatgacggaatataagctggtggtggtgggcgccggcggtgtgggcaagagtgcgctgaccatccagctgatccagaaccattttgtggacgaatacgaccccactatagaggattcctaccggaagcaggtggtcattgatggggagacgtgcctgttggacatcctggataccgccggccaggaggagtacagcgccatgcgggaccagtacatgcgcaccggggagggcttcctgtgtgtgtttgccatcaacaacaccaagtcttttgaggacatccaccagtacagggagcagatcaaacgggtgaaggactcggatgacgtgcccatggtgctggtggggaacaagtgtgacctggctgcacgcactgtggaatctcggcaggctcaggacctcgcccgaagctacggcatcccctacatcgagacctcggccaagacccggcagggcagccgctctggctctagctccagctccgggaccctctgggaccccccgggacccatgtgacccagcggcccctcgcgctggagtggaggatgccttctacacgttggtgcgtgagatccggcagcacaagctgcggaagctgaaccctcctgatgagagtggccccggctgcatgagctgcaagtgtgtgctctcctgacgcaggtgagggggactcccagggcggccgccacgcccaccggatgaccccggctccccgcccctgccggtctcctggcctgcggtcagcagcctcccttgtgccccgcccagcacaagctcaggacatggaggtgccggatgcaggaaggaggtgcagacggaaggaggaggaaggaaggacggaagcaaggaaggaaggaagggctgctggagcccagtcaccccgggaccgtgggccgaggtgactgcagaccctcccagggaggctgtgcacagactgtcttgaacatcccaaatgccaccggaaccccagcccttagctcccctcccaggcctctgtgggcccttgtcgggcacagatgggatcacagtaaattattggatggtcttgaaaaaaaaaaaaaaaaaa

SEQ ID NO: 83 - RNA, 1660 nt, Homo sapiens
  source 1..1660: mol_type = mRNA
ggtgcactagcaaaacaaacttattttgaacactcagctcctagcgtgcggcgctgccaatcattaacctcctggtgcaagtggcgcggcctgtgccctttataaggtgcgcgctgtgtccagcgagcatcggccaccgccatcccatccagcgagcatctgccgccgcgccgccgccaccctcccagagagcactggccaccgctccaccatcacttgcccagagtttgggccaccgcccgccgccaccagcccagagagcatcggcccctgtctgctgctcgcgcctggagatgtcagaggtccccgttgctcgcgtctggctggtactgctcctgctgactgtccaggtcggcgtgacagccggcgctccgtggcagtgcgcgccctgctccgccgagaagctcgcgctctgcccgccggtgtccgcctcgtgctcggaggtcacccggtccgccggctgcggctgttgcccgatgtgcgccctgcctctgggcgccgcgtgcggcgtggcgactgcacgctgcgcccggggactcagttgccgcgcgctgccgggggagcagcaacctctgcacgccctcacccgcggccaaggcgcctgcgtgcaggagtctgacgcctccgctccccatgctgcagaggcagggagccctgaaagcccagagagcacggagataactgaggaggagctcctggataatttccatctgatggccccttctgaagaggatcattccatcctttgggacgccatcagtacctatgatggctcgaaggctctccatgtcaccaacatcaaaaaatggaaggagccctgccgaatagaactctacagagtcgtagagagtttagccaaggcacaggagacatcaggagaagaaatttccaaattttacctgccaaactgcaacaagaatggattttatcacagcagacagtgtgagacatccatggatggagaggcgggactctgctggtgcgtctacccttggaatgggaagaggatccctgggtctccagagatcaggggagaccccaactgccagatatattttaatgtacaaaactgaaaccagatgaaataatgttctgtcacgtgaaatatttaagtatatagtatatttatactctagaacatgcacatttatatatatatgtatatgtatatatatatagtaactactttttatactccatacataacttgatatagaaagctgtttatttattcactgtaagtttattttttctacacagtaaaaacttgtactatgttaataacttgtcctatgtcaatttgtatatcatgaaacacttctcatcatattgtatgtaagtaattgcatttctgctcttccaaagctcctgcgtctgtttttaaagagcatggaaaaatactgcctagaaaatgcaaaatgaaataagagagagtagtttttcagctagtttgaaggaggacggttaacttgtatattccaccattcacatttgatgtacatgtgtagggaaagttaaaagtgttgattacataatcaaagctacctgtggtgatgttgccacctgttaaaatgtacactggatatgttgttaaacacgtgtctataatggaaacatttacaataaatattctgcatggaaatactgttaaaaaaaaaaa

SEQ ID NO: 84 - RNA, 2638 nt, Homo sapiens
  source 1..2638: mol_type = mRNA
agatgcgagcactgcggctgggcgctgaggatcagccgcttcctgcctggattccacagcttcgcgccgtgtactgtcgccccatccctgcgcgcccagcctgccaagcagcgtgccccggttgcaggcgtcatgcagcgggcgcgacccacgctctgggccgctgcgctgactctgctggtgctgctccgcgggccgccggtggcgcgggctggcgcgagctcggcgggcttgggtcccgtggtgcgctgcgagccgtgcgacgcgcgtgcactggcccagtgcgcgcctccgcccgccgtgtgcgcggagctggtgcgcgagccgggctgcggctgctgcctgacgtgcgcactgagcgagggccagccgtgcggcatctacaccgagcgctgtggctccggccttcgctgccagccgtcgcccgacgaggcgcgaccgctgcaggcgctgctggacggccgcgggctctgcgtcaacgctagtgccgtcagccgcctgcgcgcctacctgctgccagcgccgccagctccaggtgagccgcccgcgccaggaaatgctagtgagtcggaggaagaccgcagcgccggcagtgtggagagcccgtccgtctccagcacgcaccgggtgtctgatcccaagttccaccccctccattcaaagataatcatcatcaagaaagggcatgctaaagacagccagcgctacaaagttgactacgagtctcagagcacagatacccagaacttctcctccgagtccaagcgggagacagaatatggtccctgccgtagagaaatggaagacacactgaatcacctgaagttcctcaatgtgctgagtcccaggggtgtacacattcccaactgtgacaagaagggattttataagaaaaagcagtgtcgcccttccaaaggcaggaagcggggcttctgctggtgtgtggataagtatgggcagcctctcccaggctacaccaccaaggggaaggaggacgtgcactgctacagcatgcagagcaagtagacgcctgccgcaaggttaatgtggagctcaaatatgccttattttgcacaaaagactgccaaggacatgaccagcagctggctacagcctcgatttatatttctgtttgtggtgaactgattttttttaaaccaaagtttagaaagaggtttttgaaatgcctatggtttctttgaatggtaaacttgagcatcttttcactttccagtagtcagcaaagagcagtttgaattttcttgtcgcttcctatcaaaatattcagagactcgagcacagcacccagacttcatgcgcccgtggaatgctcaccacatgttggtcgaagcggccgaccactgactttgtgacttaggcggctgtgttgcctatgtagagaacacgcttcacccccactccccgtacagtgcgcacaggctttatcgagaataggaaaacctttaaaccccggtcatccggacatcccaacgcatgctcctggagctcacagccttctgtggtgtcatttctgaaacaagggcgtggatccctcaaccaagaagaatgtttatgtcttcaagtgacctgtactgcttggggactattggagaaaataaggtggagtcctacttgtttaaaaaatatgtatctaagaatgttctagggcactctgggaacctataaaggcaggtatttcgggccctcctcttcaggaatcttcctgaagacatggcccagtcgaaggcccaggatggcttttgctgcggccccgtggggtaggagggacagagagacagggagagtcagcctccacattcagaggcatcacaagtaatggcacaattcttcggatgactgcagaaaatagtgttttgtagttcaacaactcaagacgaagcttatttctgaggataagctctttaaaggcaaagctttattttcatctctcatcttttgtcctccttagcacaatgtaaaaaagaatagtaatatcagaacaggaaggaggaatggcttgctggggagcccatccaggacactgggagcacatagagattcacccatgtttgttgaacttagagtcattctcatgcttttctttataattcacacatatatgcagagaagatatgttcttgttaacattgtatacaacatagccccaaatatagtaagatctatactagataatcctagatgaaatgttagagatgctatatgatacaactgtggccatgactgaggaaaggagctcacgcccagagactgggctgctctcccggaggccaaacccaagaaggtctggcaaagtcaggctcagggagactctgccctgctgcagacctcggtgtggacacacgctgcatagagctctccttgaaaacagaggggtctcaagacattctgcctacctattagcttttctttatttttttaactttttggggggaaaagtatttttgagaagtttgtcttgcaatgtatttataaatagtaaataaagtttttaccattaaaaaaatatctttccctttgttattgaccatctctgggctttgtatcactaattattttattttattatataataattattttattataataaaatcctgaaaggggaaaataaaaaaaa

SEQ ID NO: 85 - RNA, 8743 nt, Homo sapiens
  source 1..8743: mol_type = mRNA
ggttgtttttcggagcctccctctgctcagcgttggtggtggcggtggcagcatggcgagccctccggagagcgatggcttctcggacgtgcgcaaggtgggctacctgcgcaaacccaagagcatgcacaaacgcttcttcgtactgcgcgcggccagcgaggctgggggcccggcgcgcctcgagtactacgagaacgagaagaagtggcggcacaagtcgagcgcccccaaacgctcgatcccccttgagagctgcttcaacatcaacaagcgggctgactccaagaacaagcacctggtggctctctacacccgggacgagcactttgccatcgcggcggacagcgaggccgagcaagacagctggtaccaggctctcctacagctgcacaaccgtgctaagggccaccacgacggagctgcggccctcggggcgggaggtggtgggggcagctgcagcggcagctccggccttggtgaggctggggaggacttgagctacggtgacgtgcccccaggacccgcattcaaagaggtctggcaagtgatcctgaagcccaagggcctgggtcagacaaagaacctgattggtatctaccgcctttgcctgaccagcaagaccatcagcttcgtgaagctgaactcggaggcagcggccgtggtgctgcagctgatgaacatcaggcgctgtggccactcggaaaacttcttcttcatcgaggtgggccgttctgccgtgacggggcccggggagttctggatgcaggtggatgactctgtggtggcccagaacatgcacgagaccatcctggaggccatgcgggccatgagtgatgagttccgccctcgcagcaagagccagtcctcgtccaactgctctaaccccatcagcgtccccctgcgccggcaccatctcaacaatcccccgcccagccaggtggggctgacccgccgatcacgcactgagagcatcaccgccacctccccggccagcatggtgggcgggaagccaggctccttccgtgtccgcgcctccagtgacggcgaaggcaccatgtcccgcccagcctcggtggacggcagccctgtgagtcccagcaccaacagaacccacgcccaccggcatcggggcagcgcccggctgcaccccccgctcaaccacagccgctccatccccatgccggcttcccgctgctcgccttcggccaccagcccggtcagtctgtcgtccagtagcaccagtggccatggctccacctcggattgtctcttcccacggcgatctagtgcttcggtgtctggttcccccagcgatggcggtttcatctcctcggatgagtatggctccagtccctgcgatttccggagttccttccgcagtgtcactccggattccctgggccacaccccaccagcccgcggtgaggaggagctaagcaactatatctgcatgggtggcaaggggccctccaccctgaccgcccccaacggtcactacattttgtctcggggtggcaatggccaccgctgcaccccaggaacaggcttgggcacgagtccagccttggctggggatgaagcagccagtgctgcagatctggataatcggttccgaaagagaactcactcggcaggcacatcccctaccattacccaccagaagaccccgtcccagtcctcagtggcttccattgaggagtacacagagatgatgcctgcctacccaccaggaggtggcagtggaggccgactgccgggacacaggcactccgccttcgtgcccacccgctcctacccagaggagggtctggaaatgcaccccttggagcgtcggggggggcaccaccgcccagacagctccaccctccacacggatgatggctacatgcccatgtccccaggggtggccccagtgcccagtggccgaaagggcagtggagactatatgcccatgagccccaagagcgtatctgccccacagcagatcatcaatcccatcagacgccatccccagagagtggaccccaatggctacatgatgatgtcccccagcggtggctgctctcctgacattggaggtggccccagcagcagcagcagcagcagcaacgccgtcccttccgggaccagctatggaaagctgtggacaaacggggtagggggccaccactctcatgtcttgcctcaccccaaacccccagtggagagcagcggtggtaagctcttaccttgcacaggtgactacatgaacatgtcaccagtgggggactccaacaccagcagcccctccgactgctactacggccctgaggacccccagcacaagccagtcctctcctactactcattgccaagatcctttaagcacacccagcgccccggggagccggaggagggtgcccggcatcagcacctccgcctttccactagctctggtcgccttctctatgctgcaacagcagatgattcttcctcttccaccagcagcgacagcctgggtgggggatactgcggggctaggctggagcccagccttccacatccccaccatcaggttctgcagccccatctgcctcgaaaggtggacacagctgctcagaccaatagccgcctggcccggcccacgaggctgtccctgggggatcccaaggccagcaccttacctcgggcccgagagcagcagcagcagcagcagcccttgctgcaccctccagagcccaagagcccgggggaatatgtcaatattgaatttgggagtgatcagtctggctacttgtctggcccggtggctttccacagctcaccttctgtcaggtgtccatcccagctccagccagctcccagagaggaagagactggcactgaggagtacatgaagatggacctggggccgggccggagggcagcctggcaggagagcactggggtcgagatgggcagactgggccctgcacctcccggggctgctagcatttgcaggcctacccgggcagtgcccagcagccggggtgactacatgaccatgcagatgagttgtccccgtcagagctacgtggacacctcgccagctgcccctgtaagctatgctgacatgcgaacaggcattgctgcagaggaggtgagcctgcccagggccaccatggctgctgcctcctcatcctcagcagcctctgcttccccgactgggcctcaaggggcagcagagctggctgcccactcgtccctgctggggggcccacaaggacctgggggcatgagcgccttcacccgggtgaacctcagtcctaaccgcaaccagagtgccaaagtgatccgtgcagacccacaagggtgccggcggaggcatagctccgagactttctcctcaacacccagtgccacccgggtgggcaacacagtgccctttggagcgggggcagcagtagggggcggtggcggtagcagcagcagcagcgaggatgtgaaacgccacagctctgcttcctttgagaatgtgtggctgaggcctggggagcttgggggagcccccaaggagccagccaaactgtgtggggctgctgggggtttggagaatggtcttaactacatagacctggatttggtcaaggacttcaaacagtgccctcaggagtgcacccctgaaccgcagcctcccccacccccaccccctcatcaacccctgggcagcggtgagagcagctccacccgccgctcaagtgaggatttaagcgcctatgccagcatcagtttccagaagcagccagaggaccgtcagtagctcaactggacatcacagcagaatgaagacctaaatgacctcagcaaatcctcttctaactcatgggtacccagactctaaatatttcatgattcacaactaggacctcatatcttcctcatcagtagatggtacgatgcatccatttcagtttgtttactttatccaatcctcaggatttcattgactgaactgcacgttctatattgtgccaagcgaaaaaaaaaaatgcactgtgacaccagaataatgagtctgcataaacttcatcttcaaccttaaggacttagctggccacagtgagctgatgtgcccaccaccgtgtcatgagagaatgggtttactctcaatgcattttcaagatacatttcatctgctgctgaaactgtgtacgacaaagcatcattgtaaattatttcatacaaaactgttcacgttgggtggagagagtattaaatatttaacataggttttgatttatatgtgtaattttttaaatgaaaatgtaacttttcttacagcacatcttttttttggatgtgggatggaggtatacaatgttctgttgtaaagagtggagcaaatgcttaaaacaaggcttaaaagagtagaatagggtatgatccttgttttaagattgtaattcagaaaacataatataagaatcatagtgccatagatggttctcaattgtatagttatatttgctgatactatctcttgtcatataaacctgatgttgagctgagttccttataagaattaatcttaattttgtattttttcctgtaagacaataggccatgttaattaaactgaagaaggatatatttggctgggtgttttcaaatgtcagcttaaaattggtaattgaatggaagcaaaattataagaagaggaaattaaagtcttccattgcatgtattgtaaacagaaggagatgggtgattccttcaattcaaaagctctctttggaatgaacaatgtgggcgtttgtaaattctggaaatgtctttctattcataataaactagatactgttgatcttttcttctgtcccctccccccaccacttctgtaagtttcctgctctattcccaccatttttttctgtgcacacattatgatatatttcatttcctgcattgtcttgagaaagatggtaaggcaagtgagctgttgctaaccagaaattaaaattccagtaagtgtttttcattatgaccagggctatgtgtcaccttccctaagactcttaccttatctcatattttttgagaacttccagtgttacattatttaactgaatgtaattggcccatttgccttggtgggtgctggcctattagtgattagttaacaaaacacagcgtacagagagcacagaaaagcttaatgacctgctactgaaacacctagccagcagtgaaaatgttaattcttttcttgtttggaaagtatacacgtcttggaattttttccacgtgaaaaacaaatggcaatgaatgcatttaaagatattgccgacagatttttaaatctttttaccaggaaacttcctaaaggttaaatgaattaatgcaaatatcaggctccctctgagtctgtgggagcctctatctctctatcaggaattcgcatccctactattgggaggagcaacattttatttctctgaacgcctaagctccctgggtgggagtggggactacaaggtaggggccagggttggagggcattgtagtggctgctgcctcctgatgaactgtttggggaccccagctctactcaaaagggagcggagataaatggaacccctcacactgctgaggcccgtgttactgttcattcagccaggtggcatgtacctcacagactgttgtgcagtgtccgttattgcagattttaatcatttgcatgctcatcaatttctaagataaatagggtctagagtcataagaatccattgttttcaaggaacttgcagaattacatcatttcctattagtagagagcactacccattttgaaaatctgatatgaaagttgttttttactcttgtaaaaaaagactttcttagtcaaactaacttttcatattttcaagcattctgattcatactcttgctagtggaagaagagagcaagctgccctgctcttttcctttgaggactgaaatagttaaagagaaatcaatgaacaaagtcactcccaaccattttcctgtaaagctggttattatttctcaaggaacctacactttgaatatgtgttaccgagatacctctacatgtggaattatcaacatgttttgaatgagagcagaaatgaacagactggaaaaatctatctcttggtttctatttctctgactttttgagtcgaaaagcataaaggtagaaattcttatttaagctgcttctagtggtgcctgagctggttttgatggtggcatcaaactaccgatttaaaactggaagttgctggtactcaaaccaaaagttcatactctggcgacacgaagggtttcctttgagcaacgtcagctgctgagtccttgtgttcagttcccattgaggagagttggcttttatccatttcaaagcatttgtaggccagccaagggctttcattattgaggcttctagtggcctctggttaacctagaagttagtgggtttttcttgatgacaccaacctctcacagcgtttttccttagagacttaagcagagttttaaaatcctcttttgcgaaaagaacaaatatgttttatgactttgatgatatcttcattctgggcaaaagaatggccctagaaccagctagaagtgaagagaatccattaatgatcaaccacctgagtcaataatgagaaatcagtactgatgttacatttgtggctatttcttgctgactttcaaaggtcaaggactcttgactaatccagtgactgcaaaaatggatctactaaaagtcatctagccagaagtagagatttttaacctttctttccctggcttttgtcttctagctatcatttaaatttgagacatttgaagtattaagaaacaatttttctgtatggtaagaaacagtattttacaatactgaagccctgttttattcaatcttgcatcttgaatacaatataccacaaagtcggaaactttatatttatttactgcaggtggttaaaaaaaggggggaaagggtttcaccatccactgacaacgagagccatgacaaatagtatccatgtgcagtcttccaactgctggtgacaatgaccccatatttggtctcatgctgcttttgcagagcactctgtaggttagtccatcacacaaggaggccctgaatccagacactgtgaattaagaccttggcggggagagatgtgacccttttggtaggaatgggaagaagaatgggtggaagccaatatgaaatttcttctttgcaatgacttgacaggggagttaatgttcctaggatgccatgaatgatgaatgttagttggaggtaatgctgtatatgtgtgtgtgtgtgtgtgtgtgtgtttgtgtgtgtgtatatatatgtgtgtgtgtatatatatgtgacatgtgtgtgtctttgtgtgtgtgtatatatatgtgacgtgtgtgtgggatgtgtgtgtgtatatatagatgaatatatacaaatatatagatatatacacacatatatagatatatatacacatatatagatatatatacacacatatatagatacacatatgtgtgtgtgtgtatatatatatatatatatatatagatgtataggcttgtgagaaacttgagaggaagaagcatgctcttctaggaatgtgaggaaatatgaccttgccaagactaaaagacctctagactgtgagctcagttatggagaacaaaaacagcttcatagtgagtagaacaccgaggataaacactggggccatgggtcctttctgaggcagcgccacagaagatctttgtggtccttccgtagttctgtaagtctgtctcctaagtatgggtagagaatatgtagcctgttgtgtgtctcccactacttgtaaacagagcatcacattaggggcagggaggaggtggaatgatattggaggtgcttaaccctactcgaggaattaattatgaataaagagcttataattagctaacatgactagaaaacacatgacttaggtggagagttagctttcttttctagtttgtgtatgacttgccatttgtgacgtatacaccaaaagatctggtgttttagacttctgccattcacttggcatttaaatctctctttgcttatgctgttaacgagtatgccataggataggacaaattcagtaaacaggaaaacttgtccatatttgcatagacatttgtagggttttttttttctttttctttttagaacttcaccattggcttaagaatgtagttcccaaaacaattttttcttgcaaagtactttccttacacctcttggctacagggtgggccaaattaaacatatatgtattttcatttaatgtatgtgcagtttggtttatcatcttaagatggtggtgctgccccggtgctacttcatctgtgtacacaaagaccaatgcatggtctgtattgctaccaaaacatttactgtatatatgtttataacatgtattatgtatatatgtaatgggtgccaggccaggtatatattttttatttagaagtgtttcacttttccaagttttctttatagtgttatgcttattttcaattttttttttcctgattctgtctggtacttagaattgtagtgtcttcatcatcaattaaagaaaactgtctaaatgaattcatggatgtaaatattagtggtccttaatgtctttgattgctggacatgaaacaaactgccaattaaattttgcggagacaaaaaaaa

SEQ ID NO: 86 - RNA, 3879 nt, Homo sapiens
  source 1..3879: mol_type = mRNA
atcagacgcgcagaggaggcggggccgcggctggtttcctgccggggggcggctctgggccgccgagtcccctcctcccgcccctgaggaggaggagccgccgccacccgccgcgcccgacacccgggaggccccgccagcccgcgggagaggcccagcgggagtcgcggaacagcaggcccgagcccaccgcgccgggccccggacgccgcgcggaaaagatgaatttacaaccaattttctggattggactgatcagttcagtttgctgtgtgtttgctcaaacagatgaaaatagatgtttaaaagcaaatgccaaatcatgtggagaatgtatacaagcagggccaaattgtgggtggtgcacaaattcaacatttttacaggaaggaatgcctacttctgcacgatgtgatgatttagaagccttaaaaaagaagggttgccctccagatgacatagaaaatcccagaggctccaaagatataaagaaaaataaaaatgtaaccaaccgtagcaaaggaacagcagagaagctcaagccagaggatattactcagatccaaccacagcagttggttttgcgattaagatcaggggagccacagacatttacattaaaattcaagagagctgaagactatcccattgacctctactaccttatggacctgtcttactcaatgaaagacgatttggagaatgtaaaaagtcttggaacagatctgatgaatgaaatgaggaggattacttcggacttcagaattggatttggctcatttgtggaaaagactgtgatgccttacattagcacaacaccagctaagctcaggaacccttgcacaagtgaacagaactgcaccagcccatttagctacaaaaatgtgctcagtcttactaataaaggagaagtatttaatgaacttgttggaaaacagcgcatatctggaaatttggattctccagaaggtggtttcgatgccatcatgcaagttgcagtttgtggatcactgattggctggaggaatgttacacggctgctggtgttttccacagatgccgggtttcactttgctggagatgggaaacttggtggcattgttttaccaaatgatggacaatgtcacctggaaaataatatgtacacaatgagccattattatgattatccttctattgctcaccttgtccagaaactgagtgaaaataatattcagacaatttttgcagttactgaagaatttcagcctgtttacaaggagctgaaaaacttgatccctaagtcagcagtaggaacattatctgcaaattctagcaatgtaattcagttgatcattgatgcatacaattccctttcctcagaagtcattttggaaaacggcaaattgtcagaaggcgtaacaataagttacaaatcttactgcaagaacggggtgaatggaacaggggaaaatggaagaaaatgttccaatatttccattggagatgaggttcaatttgaaattagcataacttcaaataagtgtccaaaaaaggattctgacagctttaaaattaggcctctgggctttacggaggaagtagaggttattcttcagtacatctgtgaatgtgaatgccaaagcgaaggcatccctgaaagtcccaagtgtcatgaaggaaatgggacatttgagtgtggcgcgtgcaggtgcaatgaagggcgtgttggtagacattgtgaatgcagcacagatgaagttaacagtgaagacatggatgcttactgcaggaaagaaaacagttcagaaatctgcagtaacaatggagagtgcgtctgcggacagtgtgtttgtaggaagagggataatacaaatgaaatttattctggcaaattctgcgagtgtgataatttcaactgtgatagatccaatggcttaatttgtggaggaaatggtgtttgcaagtgtcgtgtgtgtgagtgcaaccccaactacactggcagtgcatgtgactgttctttggatactagtacttgtgaagccagcaacggacagatctgcaatggccggggcatctgcgagtgtggtgtctgtaagtgtacagatccgaagtttcaagggcaaacgtgtgagatgtgtcagacctgccttggtgtctgtgctgagcataaagaatgtgttcagtgcagagccttcaataaaggagaaaagaaagacacatgcacacaggaatgttcctattttaacattaccaaggtagaaagtcgggacaaattaccccagccggtccaacctgatcctgtgtcccattgtaaggagaaggatgttgacgactgttggttctattttacgtattcagtgaatgggaacaacgaggtcatggttcatgttgtggagaatccagagtgtcccactggtccagacatcattccaattgtagctggtgtggttgctggaattgttcttattggccttgcattactgctgatatggaagcttttaatgataattcatgacagaagggagtttgctaaatttgaaaaggagaaaatgaatgccaaatgggacacgggtgaaaatcctatttataagagtgccgtaacaactgtggtcaatccgaagtatgagggaaaatgagtactgcccgtgcaaatcccacaacactgaatgcaaagtagcaatttccatagtcacagttaggtagctttagggcaatattgccatggttttactcatgtgcaggttttgaaaatgtacaatatgtataatttttaaaatgttttattattttgaaaataatgttgtaattcatgccagggactgacaaaagacttgagacaggatggttactcttgtcagctaaggtcacattgtgcctttttgaccttttcttcctggactattgaaatcaagcttattggattaagtgatatttctatagcgattgaaagggcaatagttaaagtaatgagcatgatgagagtttctgttaatcatgtattaaaactgatttttagctttacaaatatgtcagtttgcagttatgcagaatccaaagtaaatgtcctgctagctagttaaggattgttttaaatctgttattttgctatttgcctgttagacatgactgatgacatatctgaaagacaagtatgttgagagttgctggtgtaaaatacgtttgaaatagttgatctacaaaggccatgggaaaaattcagagagttaggaaggaaaaaccaatagctttaaaacctgtgtgccattttaagagttacttaatgtttggtaacttttatgccttcactttacaaattcaagccttagataaaagaaccgagcaattttctgctaaaaagtccttgatttagcactatttacatacaggccatactttacaaagtatttgctgaatggggaccttttgagttgaatttattttattatttttattttgtttaatgtctggtgctttctgtcacctcttctaatcttttaatgtatttgtttgcaattttggggtaagactttttttatgagtactttttctttgaagttttagcggtcaatttgcctttttaatgaacatgtgaagttatactgtggctatgcaacagctctcacctacgcgagtcttactttgagttagtgccataacagaccactgtatgtttacttctcaccatttgagttgcccatcttgtttcacactagtcacattcttgttttaagtgcctttagttttaacagttcactttttacagtgctatttactgaagttatttattaaatatgcctaaaatacttaaatcggatgtcttgactctgatgtattttatcaggttgtgtgcatgaaatttttatagattaaagaagttgaggaaaagcaaaaaaaaaa

SEQ ID NO: 87 - RNA, 6055 nt, Homo sapiens
  source 1..6055: mol_type = mRNA
actgagtcccgggaccccgggagagcggtcaatgtgtggtcgctgcgtttcctctgcctgcgccgggcatcacttgcgcgccgcagaaagtccgtctggcagcctggatatcctctcctaccggcacccgcagacgcccctgcagccgcggtcggcgcccgggctccctagccctgtgcgctcaactgtcctgcgctgcggggtgccgcgagttccacctccgcgcctccttctctagacaggcgctgggagaaagaaccggctcccgagttctgggcatttcgcccggctcgaggtgcaggatgcagagcaaggtgctgctggccgtcgccctgtggctctgcgtggagacccgggccgcctctgtgggtttgcctagtgtttctcttgatctgcccaggctcagcatacaaaaagacatacttacaattaaggctaatacaactcttcaaattacttgcaggggacagagggacttggactggctttggcccaataatcagagtggcagtgagcaaagggtggaggtgactgagtgcagcgatggcctcttctgtaagacactcacaattccaaaagtgatcggaaatgacactggagcctacaagtgcttctaccgggaaactgacttggcctcggtcatttatgtctatgttcaagattacagatctccatttattgcttctgttagtgaccaacatggagtcgtgtacattactgagaacaaaaacaaaactgtggtgattccatgtctcgggtccatttcaaatctcaacgtgtcactttgtgcaagatacccagaaaagagatttgttcctgatggtaacagaatttcctgggacagcaagaagggctttactattcccagctacatgatcagctatgctggcatggtcttctgtgaagcaaaaattaatgatgaaagttaccagtctattatgtacatagttgtcgttgtagggtataggatttatgatgtggttctgagtccgtctcatggaattgaactatctgttggagaaaagcttgtcttaaattgtacagcaagaactgaactaaatgtggggattgacttcaactgggaatacccttcttcgaagcatcagcataagaaacttgtaaaccgagacctaaaaacccagtctgggagtgagatgaagaaatttttgagcaccttaactatagatggtgtaacccggagtgaccaaggattgtacacctgtgcagcatccagtgggctgatgaccaagaagaacagcacatttgtcagggtccatgaaaaaccttttgttgcttttggaagtggcatggaatctctggtggaagccacggtgggggagcgtgtcagaatccctgcgaagtaccttggttacccacccccagaaataaaatggtataaaaatggaataccccttgagtccaatcacacaattaaagcggggcatgtactgacgattatggaagtgagtgaaagagacacaggaaattacactgtcatccttaccaatcccatttcaaaggagaagcagagccatgtggtctctctggttgtgtatgtcccaccccagattggtgagaaatctctaatctctcctgtggattcctaccagtacggcaccactcaaacgctgacatgtacggtctatgccattcctcccccgcatcacatccactggtattggcagttggaggaagagtgcgccaacgagcccagccaagctgtctcagtgacaaacccatacccttgtgaagaatggagaagtgtggaggacttccagggaggaaataaaattgaagttaataaaaatcaatttgctctaattgaaggaaaaaacaaaactgtaagtacccttgttatccaagcggcaaatgtgtcagctttgtacaaatgtgaagcggtcaacaaagtcgggagaggagagagggtgatctccttccacgtgaccaggggtcctgaaattactttgcaacctgacatgcagcccactgagcaggagagcgtgtctttgtggtgcactgcagacagatctacgtttgagaacctcacatggtacaagcttggcccacagcctctgccaatccatgtgggagagttgcccacacctgtttgcaagaacttggatactctttggaaattgaatgccaccatgttctctaatagcacaaatgacattttgatcatggagcttaagaatgcatccttgcaggaccaaggagactatgtctgccttgctcaagacaggaagaccaagaaaagacattgcgtggtcaggcagctcacagtcctagagcgtgtggcacccacgatcacaggaaacctggagaatcagacgacaagtattggggaaagcatcgaagtctcatgcacggcatctgggaatccccctccacagatcatgtggtttaaagataatgagacccttgtagaagactcaggcattgtattgaaggatgggaaccggaacctcactatccgcagagtgaggaaggaggacgaaggcctctacacctgccaggcatgcagtgttcttggctgtgcaaaagtggaggcatttttcataatagaaggtgcccaggaaaagacgaacttggaaatcattattctagtaggcacggcggtgattgccatgttcttctggctacttcttgtcatcatcctacggaccgttaagcgggccaatggaggggaactgaagacaggctacttgtccatcgtcatggatccagatgaactcccattggatgaacattgtgaacgactgccttatgatgccagcaaatgggaattccccagagaccggctgaagctaggtaagcctcttggccgtggtgcctttggccaagtgattgaagcagatgcctttggaattgacaagacagcaacttgcaggacagtagcagtcaaaatgttgaaagaaggagcaacacacagtgagcatcgagctctcatgtctgaactcaagatcctcattcatattggtcaccatctcaatgtggtcaaccttctaggtgcctgtaccaagccaggagggccactcatggtgattgtggaattctgcaaatttggaaacctgtccacttacctgaggagcaagagaaatgaatttgtcccctacaagaccaaaggggcacgattccgtcaagggaaagactacgttggagcaatccctgtggatctgaaacggcgcttggacagcatcaccagtagccagagctcagccagctctggatttgtggaggagaagtccctcagtgatgtagaagaagaggaagctcctgaagatctgtataaggacttcctgaccttggagcatctcatctgttacagcttccaagtggctaagggcatggagttcttggcatcgcgaaagtgtatccacagggacctggcggcacgaaatatcctcttatcggagaagaacgtggttaaaatctgtgactttggcttggcccgggatatttataaagatccagattatgtcagaaaaggagatgctcgcctccctttgaaatggatggccccagaaacaatttttgacagagtgtacacaatccagagtgacgtctggtcttttggtgttttgctgtgggaaatattttccttaggtgcttctccatatcctggggtaaagattgatgaagaattttgtaggcgattgaaagaaggaactagaatgagggcccctgattatactacaccagaaatgtaccagaccatgctggactgctggcacggggagcccagtcagagacccacgttttcagagttggtggaacatttgggaaatctcttgcaagctaatgctcagcaggatggcaaagactacattgttcttccgatatcagagactttgagcatggaagaggattctggactctctctgcctacctcacctgtttcctgtatggaggaggaggaagtatgtgaccccaaattccattatgacaacacagcaggaatcagtcagtatctgcagaacagtaagcgaaagagccggcctgtgagtgtaaaaacatttgaagatatcccgttagaagaaccagaagtaaaagtaatcccagatgacaaccagacggacagtggtatggttcttgcctcagaagagctgaaaactttggaagacagaaccaaattatctccatcttttggtggaatggtgcccagcaaaagcagggagtctgtggcatctgaaggctcaaaccagacaagcggctaccagtccggatatcactccgatgacacagacaccaccgtgtactccagtgaggaagcagaacttttaaagctgatagagattggagtgcaaaccggtagcacagcccagattctccagcctgactcggggaccacactgagctctcctcctgtttaaaaggaagcatccacacccccaactcctggacatcacatgagaggtgctgctcagattttcaagtgttgttctttccaccagcaggaagtagccgcatttgattttcatttcgacaacagaaaaaggacctcggactgcagggagccagtcttctaggcatatcctggaagaggcttgtgacccaagaatgtgtctgtgtcttctcccagtgttgacctgatcctctttttcattcatttaaaaagcatttatcatgccccctgctgcgggtctcaccatgggtttagaacaaagacgttcaagaaatggccccatcctcaaagaagtagcagtacctggggagctgacacttctgtaaaactagaagataaaccaggcaatgtaagtgttcgaggtgttgaagatgggaaggatttgcagggctgagtctatccaagaggctttgtttaggacgtgggtcccaagccaagccttaagtgtggaattcggattgatagaaaggaagactaacgttaccttgctttggagagtactggagcctgcaaatgcattgtgtttgctctggtggaggtgggcatggggtctgttctgaaatgtaaagggttcagacggggtttctggttttagaaggttgcgtgttcttcgagttgggctaaagtagagttcgttgtgctgtttctgactcctaatgagagttccttccagaccgttacgtgtctcctggccaagccccaggaaggaaatgatgcagctctggctccttgtctcccaggctgatcctttattcagaataccacaaagaaaggacattcagctcaaggctccctgccgtgttgaagagttctgactgcacaaaccagcttctggtttcttctggaatgaataccctcatatctgtcctgatgtgatatgtctgagactgaatgcgggaggttcaatgtgaagctgtgtgtggtgtcaaagtttcaggaaggattttacccttttgttcttccccctgtccccaacccactctcaccccgcaacccatcagtattttagttatttggcctctactccagtaaacctgattgggtttgttcactctctgaatgattattagccagacttcaaaattattttatagcccaaattataacatctattgtattatttagacttttaacatatagagctatttctactgatttttgcccttgttctgtcctttttttcaaaaaagaaaatgtgttttttgtttggtaccatagtgtgaaatgctgggaacaatgactataagacatgctatggcacatatatttatagtctgtttatgtagaaacaaatgtaatatattaaagccttatatataatgaactttgtactattcacattttgtatcagtattatgtagcataacaaaggtcataatgctttcagcaattgatgtcattttattaaagaacattgaaaaacttgaaggaatccctttgcaaggttgcattactgtacccatcatttctaaaatggaagagggggtggctgggcacagtggccgacacctaaaaacccagcactttggggggccaaggtgggaggatcgcttgagcccaggagttcaagaccagtctggccaacatggtcagattccatctcaaagaaaaaaggtaaaaataaaataaaatggagaagaaggaatcaga

SEQ ID NO: 88 - RNA, 4107 nt, Homo sapiens
  source 1..4107: mol_type = mRNA
gcgcaaccctccggaagctgccgcccctttccccttttatgggaatactttttttaaaaaaaaagagttcgctggcgccaccccgtaggactggccgccctaaaaccgtgataaaggagctgctcgccacttctcacttccgcttccttccagtaaggagtcggggtcttccccagttttctcagccaggcggcggcggcgactggcaatgtttggcctcaaaagaaacgcggtaatcggactcaacctctactgtgggggggccggcttgggggccggcagcggcggcgccacccgcccgggagggcgacttttggctacggagaaggaggcctcggcccggcgagagatagggggaggggaggccggcgcggtgattggcggaagcgccggcgcaagccccccgtccaccctcacgccagactcccggagggtcgcgcggccgccgcccattggcgccgaggtccccgacgtcaccgcgacccccgcgaggctgcttttcttcgcgcccacccgccgcgcggcgccgcttgaggagatggaagccccggccgctgacgccatcatgtcgcccgaagaggagctggacgggtacgagccggagcctctcgggaagcggccggctgtcctgccgctgctggagttggtcggggaatctggtaataacaccagtacggacgggtcactaccctcgacgccgccgccagcagaggaggaggaggacgagttgtaccggcagtcgctggagattatctctcggtaccttcgggagcaggccaccggcgccaaggacacaaagccaatgggcaggtctggggccaccagcaggaaggcgctggagaccttacgacgggttggggatggcgtgcagcgcaaccacgagacggccttccaaggcatgcttcggaaactggacatcaaaaacgaagacgatgtgaaatcgttgtctcgagtgatgatccatgttttcagcgacggcgtaacaaactggggcaggattgtgactctcatttcttttggtgcctttgtggctaaacacttgaagaccataaaccaagaaagctgcatcgaaccattagcagaaagtatcacagacgttctcgtaaggacaaaacgggactggctagttaaacaaagaggctgggatgggtttgtggagttcttccatgtagaggacctagaaggtggcatcaggaatgtgctgctggcttttgcaggtgttgctggagtaggagctggtttggcatatctaataagatagccttactgtaagtgcaatagttgacttttaaccaaccaccaccaccaccaaaaccagtttatgcagttggactccaagctgtaacttcctagagttgcaccctagcaacctagccagaaaagcaagtggcaagaggattatggctaacaagaataaatacatgggaagagtgctccccattgattgaagagtcactgtctgaaagaagcaaagttcagtttcagcaacaaacaaactttgtttgggaagctatggaggaggacttttagatttagtgaagatggtagggtggaaagacttaatttccttgttgagaacaggaaagtggccagtagccaggcaagtcatagaattgattacccgccgaattcattaatttactgtagtgttaagagaagcactaagaatgccagtgacctgtgtaaaagttacaagtaatagaactatgactgtaagcctcagtactgtacaagggaagcttttcctctctctaattagctttcccagtatacttcttagaaagtccaagtgttcaggacttttatacctgttatactttggcttggtttccatgattcttactttattagcctagtttatcaccaataatacttgacggaaggctcagtaattagttatgaatatggatatcctcaattcttaagacagcttgtaaatgtatttgtaaaaattgtatatatttttacagaaagtctatttctttgaaacgaaggaagtatcgaatttacattagtttttttcatacccttttgaactttgcaacttccgtaattaggaacctgtttcttacagcttttctatgctaaactttgttctgttcagttctagagtgtatacagaacgaattgatgtgtaactgtatgcagactggttgtagtggaacaaatctgataactatgcaggtttaaattttcttatctgattttggtaagtattccttagataggtttttctttgaaaacctgggattgagaggttgatgaatggaaattctttcacttcattatatgcaagttttcaataattaggtctaagtggagttttaaggttactgatgacttacaaataatgggctctgattgggcaatactcatttgagttccttccatttgacctaatttaactggtgaaatttaaagtgaattcatgggctcatctttaaagcttttactaaaagattttcagctgaatggaactcattagctgtgtgcatataaaaagatcacatcaggtggatggagagacatttgatcccttgtttgcttaataaattataaaatgatggcttggaaaagcaggctagtctaaccatggtgctattattaggcttgcttgttacacacacaggtctaagcctagtatgtcaataaagcaaatacttactgttttgtttctattaatgattcccaaaccttgttgcaagtttttgcattggcatctttggatttcagtcttgatgtttgttctatcagacttaaccttttatttcctgtccttccttgaaattgctgattgttctgctccctctacagatatttatatcaattcctacagctttcccctgccatccctgaactctttctagcccttttagattttggcactgtgaaacccctgctggaaacctgagtgaccctccctccccaccaagagtccacagacctttcatctttcacgaacttgatcctgttagcaggtggtaataccatgggtgctgtgacactaacagtcattgagaggtgggaggaagtcccttttccttggactggtatcttttcaactattgttttatcctgtctttgggggcaatgtgtcaaaagtcccctcaggaattttcagaggaaagaacattttatgaggctttctctaaagtttcctttgtataggagtatgctcacttaaatttacagaaagaggtgagctgtgttaaacctcagagtttaaaagctactgataaactgaagaaagtgtctatattggaactagggtcatttgaaagcttcagtctcggaacatgacctttagtctgtggactccatttaaaaataggtatgaataagatgactaagaatgtaatggggaagaactgccctgcctgcccatctcagagccataaggtcatctttgctagagctatttttacctatgtatttatcgttcttgatcataagccgcttatttatatcatgtatctctaaggacctaaaagcactttatgtagtttttaattaatcttaagatctggttacggtaactaaaaaagcctgtctgccaaatccagtggaaacaagtgcatagatgtgaattggtttttaggggccccacttcccaattcattaggtatgactgtggaaatacagacaaggatcttagttgatattttgggcttggggcagtgagggcttaggacaccccaagtggtttgggaaaggaggaggggagtggtgggtttatagggggaggaggaggcaggtggtctaagtgctgactggctacgtagttcgggcaaatcctccaaaagggaaagggaggatttgcttagaaggatggcgctcccagtgactactttttgacttctgtttgtcttacgcttctctcagggaaaaacatgcagtcctctagtgtttcatgtacattctgtggggggtgaacaccttggttctggttaaacagctgtacttttgatagctgtgccaggaagggttaggaccaactacaaattaatgttggttgtcaaatgtagtgtgtttccctaactttctgtttttcctgagaaaaaaaaataaatcttttattcaaatacagggaaaaaaaaaaaaaaaaaa

SEQ ID NO: 89 - RNA, 6695 nt, Homo sapiens
  source 1..6695: mol_type = mRNA
gccctcgccgcccgcggcgccccgagcgctttgtgagcagatgcggagccgagtggagggcgcgagccagatgcggggcgacagctgacttgctgagaggaggcggggaggcgcggagcgcgcgtgtggtccttgcgccgctgacttctccactggttcctgggcaccgaaagataaacctctcataatgaaggcccccgctgtgcttgcacctggcatcctcgtgctcctgtttaccttggtgcagaggagcaatggggagtgtaaagaggcactagcaaagtccgagatgaatgtgaatatgaagtatcagcttcccaacttcaccgcggaaacacccatccagaatgtcattctacatgagcatcacattttccttggtgccactaactacatttatgttttaaatgaggaagaccttcagaaggttgctgagtacaagactgggcctgtgctggaacacccagattgtttcccatgtcaggactgcagcagcaaagccaatttatcaggaggtgtttggaaagataacatcaacatggctctagttgtcgacacctactatgatgatcaactcattagctgtggcagcgtcaacagagggacctgccagcgacatgtctttccccacaatcatactgctgacatacagtcggaggttcactgcatattctccccacagatagaagagcccagccagtgtcctgactgtgtggtgagcgccctgggagccaaagtcctttcatctgtaaaggaccggttcatcaacttctttgtaggcaataccataaattcttcttatttcccagatcatccattgcattcgatatcagtgagaaggctaaaggaaacgaaagatggttttatgtttttgacggaccagtcctacattgatgttttacctgagttcagagattcttaccccattaagtatgtccatgcctttgaaagcaacaattttatttacttcttgacggtccaaagggaaactctagatgctcagacttttcacacaagaataatcaggttctgttccataaactctggattgcattcctacatggaaatgcctctggagtgtattctcacagaaaagagaaaaaagagatccacaaagaaggaagtgtttaatatacttcaggctgcgtatgtcagcaagcctggggcccagcttgctagacaaataggagccagcctgaatgatgacattcttttcggggtgttcgcacaaagcaagccagattctgccgaaccaatggatcgatctgccatgtgtgcattccctatcaaatatgtcaacgacttcttcaacaagatcgtcaacaaaaacaatgtgagatgtctccagcatttttacggacccaatcatgagcactgctttaataggacacttctgagaaattcatcaggctgtgaagcgcgccgtgatgaatatcgaacagagtttaccacagctttgcagcgcgttgacttattcatgggtcaattcagcgaagtcctcttaacatctatatccaccttcattaaaggagacctcaccatagctaatcttgggacatcagagggtcgcttcatgcaggttgtggtttctcgatcaggaccatcaacccctcatgtgaattttctcctggactcccatccagtgtctccagaagtgattgtggagcatacattaaaccaaaatggctacacactggttatcactgggaagaagatcacgaagatcccattgaatggcttgggctgcagacatttccagtcctgcagtcaatgcctctctgccccaccctttgttcagtgtggctggtgccacgacaaatgtgtgcgatcggaggaatgcctgagcgggacatggactcaacagatctgtctgcctgcaatctacaaggttttcccaaatagtgcaccccttgaaggagggacaaggctgaccatatgtggctgggactttggatttcggaggaataataaatttgatttaaagaaaactagagttctccttggaaatgagagctgcaccttgactttaagtgagagcacgatgaatacattgaaatgcacagttggtcctgccatgaataagcatttcaatatgtccataattatttcaaatggccacgggacaacacaatacagtacattctcctatgtggatcctgtaataacaagtatttcgccgaaatacggtcctatggctggtggcactttacttactttaactggaaattacctaaacagtgggaattctagacacatttcaattggtggaaaaacatgtactttaaaaagtgtgtcaaacagtattcttgaatgttataccccagcccaaaccatttcaactgagtttgctgttaaattgaaaattgacttagccaaccgagagacaagcatcttcagttaccgtgaagatcccattgtctatgaaattcatccaaccaaatcttttattagtacttggtggaaagaacctctcaacattgtcagttttctattttgctttgccagtggtgggagcacaataacaggtgttgggaaaaacctgaattcagttagtgtcccgagaatggtcataaatgtgcatgaagcaggaaggaactttacagtggcatgtcaacatcgctctaattcagagataatctgttgtaccactccttccctgcaacagctgaatctgcaactccccctgaaaaccaaagcctttttcatgttagatgggatcctttccaaatactttgatctcatttatgtacataatcctgtgtttaagccttttgaaaagccagtgatgatctcaatgggcaatgaaaatgtactggaaattaagggaaatgatattgaccctgaagcagttaaaggtgaagtgttaaaagttggaaataagagctgtgagaatatacacttacattctgaagccgttttatgcacggtccccaatgacctgctgaaattgaacagcgagctaaatatagagtggaagcaagcaatttcttcaaccgtccttggaaaagtaatagttcaaccagatcagaatttcacaggattgattgctggtgttgtctcaatatcaacagcactgttattactacttgggtttttcctgtggctgaaaaagagaaagcaaattaaagatctgggcagtgaattagttcgctacgatgcaagagtacacactcctcatttggataggcttgtaagtgcccgaagtgtaagcccaactacagaaatggtttcaaatgaatctgtagactaccgagctacttttccagaagatcagtttcctaattcatctcagaacggttcatgccgacaagtgcagtatcctctgacagacatgtcccccatcctaactagtggggactctgatatatccagtccattactgcaaaatactgtccacattgacctcagtgctctaaatccagagctggtccaggcagtgcagcatgtagtgattgggcccagtagcctgattgtgcatttcaatgaagtcataggaagagggcattttggttgtgtatatcatgggactttgttggacaatgatggcaagaaaattcactgtgctgtgaaatccttgaacagaatcactgacataggagaagtttcccaatttctgaccgagggaatcatcatgaaagattttagtcatcccaatgtcctctcgctcctgggaatctgcctgcgaagtgaagggtctccgctggtggtcctaccatacatgaaacatggagatcttcgaaatttcattcgaaatgagactcataatccaactgtaaaagatcttattggctttggtcttcaagtagccaaaggcatgaaatatcttgcaagcaaaaagtttgtccacagagacttggctgcaagaaactgtatgctggatgaaaaattcacagtcaaggttgctgattttggtcttgccagagacatgtatgataaagaatactatagtgtacacaacaaaacaggtgcaaagctgccagtgaagtggatggctttggaaagtctgcaaactcaaaagtttaccaccaagtcagatgtgtggtcctttggcgtgctcctctgggagctgatgacaagaggagccccaccttatcctgacgtaaacacctttgatataactgtttacttgttgcaagggagaagactcctacaacccgaatactgcccagaccccttatatgaagtaatgctaaaatgctggcaccctaaagccgaaatgcgcccatccttttctgaactggtgtcccggatatcagcgatcttctctactttcattggggagcactatgtccatgtgaacgctacttatgtgaacgtaaaatgtgtcgctccgtatccttctctgttgtcatcagaagataacgctgatgatgaggtggacacacgaccagcctccttctgggagacatcatagtgctagtactatgtcaaagcaacagtccacactttgtccaatggttttttcactgcctgacctttaaaaggccatcgatattctttgctcttgccaaaattgcactattataggacttgtattgttatttaaattactggattctaaggaatttcttatctgacagagcatcagaaccagaggcttggtcccacaggccacggaccaatggcctgcagccgtgacaacactcctgtcatattggagtccaaaacttgaattctgggttgaattttttaaaaatcaggtaccacttgatttcatatgggaaattgaagcaggaaatattgagggcttcttgatcacagaaaactcagaagagatagtaatgctcaggacaggagcggcagccccagaacaggccactcatttagaattctagtgtttcaaaacacttttgtgtgttgtatggtcaataacatttttcattactgatggtgtcattcacccattaggtaaacattcccttttaaatgtttgtttgttttttgagacaggatctcactctgttgccagggctgtagtgcagtggtgtgatcatagctcactgcaacctccacctcccaggctcaagcctcccgaatagctgggactacaggcgcacaccaccatccccggctaatttttgtattttttgtagagacggggttttgccatgttgccaaggctggtttcaaactcctggactcaagaaatccacccacctcagcctcccaaagtgctaggattacaggcatgagccactgcgcccagcccttataaatttttgtatagacattcctttggttggaagaatatttataggcaatacagtcaaagtttcaaaatagcatcacacaaaacatgtttataaatgaacaggatgtaatgtacatagatgacattaagaaaatttgtatgaaataatttagtcatcatgaaatatttagttgtcatataaaaacccactgtttgagaatgatgctactctgatctaatgaatgtgaacatgtagatgttttgtgtgtatttttttaaatgaaaactcaaaataagacaagtaatttgttgataaatatttttaaagataactcagcatgtttgtaaagcaggatacattttactaaaaggttcattggttccaatcacagctcataggtagagcaaagaaagggtggatggattgaaaagattagcctctgtctcggtggcaggttcccacctcgcaagcaattggaaacaaaacttttggggagttttattttgcattagggtgtgttttatgttaagcaaaacatactttagaaacaaatgaaaaaggcaattgaaaatcccagctatttcacctagatggaatagccaccctgagcagaactttgtgatgcttcattctgtggaattttgtgcttgctactgtatagtgcatgtggtgtaggttactctaactggttttgtcgacgtaaacatttaaagtgttatattttttataaaaatgtttatttttaatgatatgagaaaaattttgttaggccacaaaaacactgcactgtgaacattttagaaaaggtatgtcagactgggattaatgacagcatgattttcaatgactgtaaattgcgataaggaaatgtactgattgccaatacaccccaccctcattacatcatcaggacttgaagccaagggttaacccagcaagctacaaagagggtgtgtcacactgaaactcaatagttgagtttggctgttgttgcaggaaaatgattataactaaaagctctctgatagtgcagagacttaccagaagacacaaggaattgtactgaagagctattacaatccaaatattgccgtttcataaatgtaataagtaatactaattcacagagtattgtaaatggtggatgacaaaagaaaatctgctctgtggaaagaaagaactgtctctaccagggtcaagagcatgaacgcatcaatagaaagaactcggggaaacatcccatcaacaggactacacacttgtatatacattcttgagaacactgcaatgtgaaaatcacgtttgctatttataaacttgtccttagattaatgtgtctggacagattgtgggagtaagtgattcttctaagaattagatacttgtcactgcctatacctgcagctgaactgaatggtacttcgtatgttaatagttgttctgataaatcatgcaattaaagtaaagtgatgcaacatcttgtaaaaaaaaaaaaaaaaaaaa

SEQ ID NO: 90 - RNA, 3226 nt, Homo sapiens
  source 1..3226: mol_type = mRNA
aagctgattgggtgtggtcgccgtggccggacgccgctcgggggacgtgggaggggaggcgggaaacagcttagtgggtgtggggtcgcgcattttcttcaaccaggaggtgaggaggtttcgacatggcggtgcagccgaaggagacgctgcagttggagagcgcggccgaggtcggcttcgtgcgcttctttcagggcatgccggagaagccgaccaccacagtgcgccttttcgaccggggcgacttctatacggcgcacggcgaggacgcgctgctggccgcccgggaggtgttcaagacccagggggtgatcaagtacatggggccggcaggagcaaagaatctgcagagtgttgtgcttagtaaaatgaattttgaatcttttgtaaaagatcttcttctggttcgtcagtatagagttgaagtttataagaatagagctggaaataaggcatccaaggagaatgattggtatttggcatataaggcttctcctggcaatctctctcagtttgaagacattctctttggtaacaatgatatgtcagcttccattggtgttgtgggtgttaaaatgtccgcagttgatggccagagacaggttggagttgggtatgtggattccatacagaggaaactaggactgtgtgaattccctgataatgatcagttctccaatcttgaggctctcctcatccagattggaccaaaggaatgtgttttacccggaggagagactgctggagacatggggaaactgagacagataattcaaagaggaggaattctgatcacagaaagaaaaaaagctgacttttccacaaaagacatttatcaggacctcaaccggttgttgaaaggcaaaaagggagagcagatgaatagtgctgtattgccagaaatggagaatcaggttgcagtttcatcactgtctgcggtaatcaagtttttagaactcttatcagatgattccaactttggacagtttgaactgactacttttgacttcagccagtatatgaaattggatattgcagcagtcagagcccttaacctttttcagggttctgttgaagataccactggctctcagtctctggctgccttgctgaataagtgtaaaacccctcaaggacaaagacttgttaaccagtggattaagcagcctctcatggataagaacagaatagaggagagattgaatttagtggaagcttttgtagaagatgcagaattgaggcagactttacaagaagatttacttcgtcgattcccagatcttaaccgacttgccaagaagtttcaaagacaagcagcaaacttacaagattgttaccgactctatcagggtataaatcaactacctaatgttatacaggctctggaaaaacatgaaggaaaacaccagaaattattgttggcagtttttgtgactcctcttactgatcttcgttctgacttctccaagtttcaggaaatgatagaaacaactttagatatggatcaggtggaaaaccatgaattccttgtaaaaccttcatttgatcctaatctcagtgaattaagagaaataatgaatgacttggaaaagaagatgcagtcaacattaataagtgcagccagagatcttggcttggaccctggcaaacagattaaactggattccagtgcacagtttggatattactttcgtgtaacctgtaaggaagaaaaagtccttcgtaacaataaaaactttagtactgtagatatccagaagaatggtgttaaatttaccaacagcaaattgacttctttaaatgaagagtataccaaaaataaaacagaatatgaagaagcccaggatgccattgttaaagaaattgtcaatatttcttcaggctatgtagaaccaatgcagacactcaatgatgtgttagctcagctagatgctgttgtcagctttgctcacgtgtcaaatggagcacctgttccatatgtacgaccagccattttggagaaaggacaaggaagaattatattaaaagcatccaggcatgcttgtgttgaagttcaagatgaaattgcatttattcctaatgacgtatactttgaaaaagataaacagatgttccacatcattactggccccaatatgggaggtaaatcaacatatattcgacaaactggggtgatagtactcatggcccaaattgggtgttttgtgccatgtgagtcagcagaagtgtccattgtggactgcatcttagcccgagtaggggctggtgacagtcaattgaaaggagtctccacgttcatggctgaaatgttggaaactgcttctatcctcaggtctgcaaccaaagattcattaataatcatagatgaattgggaagaggaacttctacctacgatggatttgggttagcatgggctatatcagaatacattgcaacaaagattggtgctttttgcatgtttgcaacccattttcatgaacttactgccttggccaatcagataccaactgttaataatctacatgtcacagcactcaccactgaagagaccttaactatgctttatcaggtgaagaaaggtgtctgtgatcaaagttttgggattcatgttgcagagcttgctaatttccctaagcatgtaatagagtgtgctaaacagaaagccctggaacttgaggagtttcagtatattggagaatcgcaaggatatgatatcatggaaccagcagcaaagaagtgctatctggaaagagagcaaggtgaaaaaattattcaggagttcctgtccaaggtgaaacaaatgccctttactgaaatgtcagaagaaaacatcacaataaagttaaaacagctaaaagctgaagtaatagcaaagaataatagctttgtaaatgaaatcatttcacgaataaaagttactacgtgaaaaatcccagtaatggaatgaaggtaatattgataagctattgtctgtaatagttttatattgttttatattaaccctttttccatagtgttaactgtcagtgcccatgggctatcaacttaataagatatttagtaatattttactttgaggacattttcaaagatttttattttgaaaaatgagagctgtaactgaggactgtttgcaattgacataggcaataataagtgatgtgctgaattttataaataaaatcatgtagtttgtggaatttgaaaaaaaaaaaaaaaaaa

SEQ ID NO: 91 - RNA, 4472 nt, Homo sapiens
  source 1..4472: mol_type = mRNA
ccgcagacgcctgggaactgcggccgcgggctcgcgctcctcgccaggccctgccgccgggctgccatccttgccctgccatgtctcgccggaagcctgcgtcgggcggcctcgctgcctccagctcagcccctgcgaggcaagcggttttgagccgattcttccagtctacgggaagcctgaaatccacctcctcctccacaggtgcagccgaccaggtggaccctggcgctgcagcggctgcagcggccgcagcggccgcagcgcccccagcgcccccagctcccgccttcccgccccagctgccgccgcacatagctacagaaattgacagaagaaagaagagaccattggaaaatgatgggcctgttaaaaagaaagtaaagaaagtccaacaaaaggaaggaggaagtgatctgggaatgtctggcaactctgagccaaagaaatgtctgaggaccaggaatgtttcaaagtctctggaaaaattgaaagaattctgctgcgattctgcccttcctcaaagtagagtccagacagaatctctgcaggagagatttgcagttctgccaaaatgtactgattttgatgatatcagtcttctacacgcaaagaatgcagtttcttctgaagattcgaaacgtcaaattaatcaaaaggacacaacactttttgatctcagtcagtttggatcatcaaatacaagtcatgaaaatttacagaaaactgcttccaaatcagctaacaaacggtccaaaagcatctatacgccgctagaattacaatacatagaaatgaagcagcagcacaaagatgcagttttgtgtgtggaatgtggatataagtatagattctttggggaagatgcagagattgcagcccgagagctcaatatttattgccatttagatcacaactttatgacagcaagtatacctactcacagactgtttgttcatgtacgccgcctggtggcaaaaggatataaggtgggagttgtgaagcaaactgaaactgcagcattaaaggccattggagacaacagaagttcactcttttcccggaaattgactgccctttatacaaaatctacacttattggagaagatgtgaatcccctaatcaagctggatgatgctgtaaatgttgatgagataatgactgatacttctaccagctatcttctgtgcatctctgaaaataaggaaaatgttagggacaaaaaaaagggcaacatttttattggcattgtgggagtgcagcctgccacaggcgaggttgtgtttgatagtttccaggactctgcttctcgttcagagctagaaacccggatgtcaagcctgcagccagtagagctgctgcttccttcggccttgtccgagcaaacagaggcgctcatccacagagccacatctgttagtgtgcaggatgacagaattcgagtcgaaaggatggataacatttattttgaatacagccatgctttccaggcagttacagagttttatgcaaaagatacagttgacatcaaaggttctcaaattatttctggcattgttaacttagagaagcctgtgatttgctctttggctgccatcataaaatacctcaaagaattcaacttggaaaagatgctctccaaacctgagaattttaaacagctatcaagtaaaatggaatttatgacaattaatggaacaacattaaggaatctggaaatcctacagaatcagactgatatgaaaaccaaaggaagtttgctgtgggttttagaccacactaaaacttcatttgggagacggaagttaaagaagtgggtgacccagccactccttaaattaagggaaataaatgcccggcttgatgctgtatcggaagttctccattcagaatctagtgtgtttggtcagatagaaaatcatctacgtaaattgcccgacatagagaggggactctgtagcatttatcacaaaaaatgttctacccaagagttcttcttgattgtcaaaactttatatcacctaaagtcagaatttcaagcaataatacctgctgttaattcccacattcagtcagacttgctccggaccgttattttagaaattcctgaactcctcagtccagtggagcattacttaaagatactcaatgaacaagctgccaaagttggggataaaactgaattatttaaagacctttctgacttccctttaataaaaaagaggaaggatgaaattcaaggtgttattgacgagatccgaatgcatttgcaagaaatacgaaaaatactaaaaaatccttctgcacaatatgtgacagtatcaggacaggagtttatgatagaaataaagaactctgctgtatcttgtataccaactgattgggtaaaggttggaagcacaaaagctgtgagccgctttcactctccttttattgtagaaaattacagacatctgaatcagctccgggagcagctagtccttgactgcagtgctgaatggcttgattttctagagaaattcagtgaacattatcactccttgtgtaaagcagtgcatcacctagcaactgttgactgcattttctccctggccaaggtcgctaagcaaggagattactgcagaccaactgtacaagaagaaagaaaaattgtaataaaaaatggaaggcaccctgtgattgatgtgttgctgggagaacaggatcaatatgtcccaaataatacagatttatcagaggactcagagagagtaatgataattaccggaccaaacatgggtggaaagagctcctacataaaacaagttgcattgattaccatcatggctcagattggctcctatgttcctgcagaagaagcgacaattgggattgtggatggcattttcacaaggatgggtgctgcagacaatatatataaaggacagagtacatttatggaagaactgactgacacagcagaaataatcagaaaagcaacatcacagtccttggttatcttggatgaactaggaagagggacgagcactcatgatggaattgccattgcctatgctacacttgagtatttcatcagagatgtgaaatccttaaccctgtttgtcacccattatccgccagtttgtgaactagaaaaaaattactcacaccaggtggggaattaccacatgggattcttggtcagtgaggatgaaagcaaactggatccaggcgcagcagaacaagtccctgattttgtcaccttcctttaccaaataactagaggaattgcagcaaggagttatggattaaatgtggctaaactagcagatgttcctggagaaattttgaagaaagcagctcacaagtcaaaagagctggaaggattaataaatacgaaaagaaagagactcaagtattttgcaaagttatggacgatgcataatgcacaagacctgcagaagtggacagaggagttcaacatggaagaaacacagacttctcttcttcattaaaatgaagactacatttgtgaacaaaaaatggagaattaaaaataccaactgtacaaaataactctccagtaacagcctatctttgtgtgacatgtgagcataaaattatgaccatggtatattcctattggaaacagagaggtttttctgaagacagtctttttcaagtttctgtcttcctaacttttctacgtataaacactcttgaatagacttccactttgtaattagaaaattttatggacagtaagtccagtaaagccttaagtggcagaatataattcccaagcttttggagggtgatataaaaatttacttgatatttttatttgtttcagttcagataattggcaactgggtgaatctggcaggaatctatccattgaactaaaataattttattatgcaaccagtttatccaccaagaacataagaattttttataagtagaaagaattggccaggcatggtggctcatgcctgtaatcccagcactttgggaggccaaggtaggcagatcacctgaggtcaggagttcaagaccagcctggccaacatggcaaaaccccatctttactaaaaatataaagtacatctctactaaaaatacgaaaaaattagctgggcatggtggcgcacacctgtagtcccagctactccggaggctgaggcaggagaatctcttgaacctgggaggcggaggttgcaatgagccgagatcacgtcactgcactccagcttgggcaacagagcaagactccatctcaaaaaaaaaaaaagaaaaaagaaaagaaatagaattatcaagcttttaaaaactagagcacagaaggaataaggtcatgaaatttaaaaggttaaatattgtcataggattaagcagtttaaagattgttggatgaaattatttgtcattcattcaagtaataaatatttaatgaatacttgctataaaaaaaaaaaaaaaaaaaaaaaaaa

SEQ ID NO: 92 - RNA, 7667 nt, Homo sapiens
  source 1..7667: mol_type = mRNA
ggcccaagccgccattgttccgccgagggaggacagcggggcctggcgctggcgccgagacgccgcttagcggccgccactggagacactccctcccgcctcccgggtctcctggcggcggcggagtgaggctgacagcggggaacctgggagacccctccgccctccccgcggtggcagcggccgatccccggctccggcgcgagggacggccgcgatgcgctcggcctgaggttacccggcccggcccttcctcgcttccctcgactattccactgcgtctccgcgccccggcgtcatcctgcgagtccctctgacgggagggaagatggctgcacggagctggcaggacgagctggcccagcaggccgaggagggctcggcccggctgcgggaaatgctctcggtcggcctaggctttctgcgcaccgagctgggcctcgacctggggctggagccgaaacggtaccccggctgggtgatcctggtgggcactggcgcgctcgggctgctgctgctgtttctgctgggctacggctgggccgcggcttgcgccggcgcccgcaaaaagcggaggagcccgccccgcaagcgggaggaggcggcggccgtgccggccgcggcccccgacgacctggccttgctgaagaatctccggagcgaggaacagaagaagaagaaccggaagaaactgtccgagaagcccaaaccaaatgggcggactgttgaagtggctgagggtgaagctgttcgaacacctcaaagtgtaacagcaaagcagccaccagagattgacaagaaaaatgaaaagtcaaagaaaaataagaagaaatcaaagtcagatgctaaagcagtgcaaaacagttcacgccatgatggaaaggaagttgatgaaggagcctgggaaactaaaattagtcacagagagaaacgacagcagcgtaaacgtgataaggtgctgactgattctggttcattggattcaactatccctgggatagaaaataccatcacagttaccaccgagcaacttacaaccgcatcatttcctgttggttccaagaagaataaaggtgattctcatctaaatgttcaagttagcaactttaaatctggaaaaggagattctacacttcaggtttcttcaggattgaatgaaaacctcactgtcaatggaggaggctggaatgaaaagtctgtaaaactctcctcacagatcagtgcaggtgaggagaagtggaactccgtttcacctgcttctgcaggaaagaggaaaactgagccatctgcctggagtcaagacactggagatgctaatacaaatggaaaagactggggaaggagttggagtgaccgttcaatattttctggcattgggtctactgctgagccagtttctcagtctaccacttctgattatcagtgggatgttagccgtaatcaaccctatatcgatgatgaatggtctgggttaaatggtctgtcttctgctgatcccaactctgattggaatgcaccagcagaagagtggggcaattgggtagacgaagaaagagcttcacttctaaagtcccaggaaccaattcctgatgatcaaaaggtctcagatgatgataaagaaaagggagagggagctcttccaactgggaaatccaaaaagaaaaaaaagaaaaagaagaagcaaggtgaagataactctactgcacaggacacagaagaattagaaaaagagattagagaagaccttccagtgaatacctctaaaacccgtccaaaacaggaaaaagctttttccttgaagaccataagcactagtgatccagccgaagtactcgtcaaaaatagccagcctatcaagactcttccacctgctacttctaccgagccatctgtaatcttatcaaaaagtgattctgacaagagctcttcccaagtgccgccaatactacaagagacagataaatccaagtcaaataccaagcaaaatagtgtgcctccttcacagaccaagtctgaaactagctgggaatctcccaaacaaataaaaaagaagaaaaaagccagacgagaaacgtgaaattttttttcctgaattggacatgtgtttgcaaacacttgtcttgaagattatgctgtttatgcaataatttgtgaacatgtacagagttttatataaatttaaaccaatttttaaaacaaaactgcggacaccaccataaaaatggaatcaaaagaaagttaatttatgaaattaagaggtcagcagaatatactcagtgatggaagacacttgggaaagtctttttaatagaacaagaacgatcttaatttaagaatattatcctggtttaacaacagtgccctgtttacaacagattgtgccctatctcatctgcagccgaggaataaaggattctgattagaaagagggttgcctacagattagtaagcaattccttggatcttatgcacagaacttgtaccatttgaatctgttttatgcttaaatcaaagtgctttgatcaaatgcataacctgccatatctttacatatttgttggtagcaatttgtattaaagaaatcacaagtgcaaataaaaagtcatttatcatttgtttaactaaactgtcatggtttagtttacaatttttaaaaagttcttaaaatactgaaaatgcagttgacacttgtgtatggcttatgaagttatttttgatagtcttacattacttgaattgttcaaagtacagtatattttaaattaagaaaagtgaactatatgtatttgttttatacatttaaggcttagactcataaataatgctattgtttatgatttgaaaactttcaggcaaaatccaatttacatttttcccttccctagcaattacttttttccagcttcaactcttcttagttactaatactttgttgactttaaaaatgaaatcattcacaaacttttggtatatgatggagaatgaaaaactagagtcagacagctttaattgacattgtcaacacctccagttatcaggaatacatttttttactgccttaacctgtagtgcgtagaatatgcatcaatttcttgaaggagattcatgtttttataagaattttcatgtaattattgcaattgtggtcaaataaggaacgtttcctgcttgaaattatattgatttaaatgatgtgtgagatgtttcaccattttcaggcactgtgtaattctattgtaataaactggcaggtatctttgtaactataaatagtgcatgctcagccatgtacactgtaaatagcctttaccaaacgtgtttgacaaggaccataattaacatcacttagtgaattgtgataaagaaaaaaaagccatgatttattcgatgtgattggcttgtttttatgtggcgccaagaacgaacctgtttaacagctgtaaccaatggtactgatctatccatccaatgttgtcattatatttgactgtggttcaacagtattgcgttgtcagactaggaaagctaaacgaacaaaatggttttagttttgctgaagactggccttattaatggacagctttcctaacaagagattattaacttttatcaggtgttaacatctgtttcaggaacatggcagtatgtttacatgtcagaagttttgtttaattctatggtatttctaaattgacttgtttaaataaattcagcaaatggatagcattgttttttatttgcttcaatatgggggtagataatagctaaagagccaaggatgaatttcttcaaatgactttattctgttagctttacataggtgttggaggattcctaaggtgtcagcattttgtaaaggtaccacaaaggagaagttgatagggaatctaattttagaatgtgccaaatggtctgtgctcaacaatataattgaactctctcaactctacctcaccatttctttatctcaaaattctgttggctttgtcaaacgttggattttatttctgcagcctagtatctccccattctaccacctatgccagatgttaaagacagcagatgttttgaggagaatggcattgtggagatgcagagatgcgttgctaagttgaggtggatccagtatagagatacctctatttcttctttatggctcaagagctaggacttggattttgttttaagagatggcagctggccgggtgcagtggctcacgtctgtaatcccagcactttgggaggccgaggcaggtggatcacgaggtcaggagttcaagaccagcctggccaagagggtgaaaccccatctttactaaaaatacaaaaaaaaaaattagctgggtgtggtggtgggctcctgtaatcccagctactcaggaggctaaggcagagaatcatttgaacccaggagacggagtttgcaaagccaagatcgtgccactgcactccagcctgggcaacagaaggagactccgtctcaaaaaaaaaaaaaagatggcagctatataaatgataaaattaattacattctctttcacatgcatgaggtgcaaactctgtcacaaagtattttaattaccttttaccttgtttcatagatctttatgtgacataaaaacagtttctggcacggtggctcacgcctgtaatcctagcactttgggaggctgaggcaggtggatcacctgaggtcaggagtttgagaccagcctggccaatatggtgaaaccccatctctacaaaatttgcaaaaagtagatgggtgtggtagtgggcgcctgtaatcccagctactcaggaggttgaggcagagaatcgcttgaacccggggggtggaggttgcagtgagctgagatcgcaccactgcactccagcatgaaagagcgagactcaatctcaaaaaaaaaaaagtttctggcacctgaacaggaactggtttccatcatcaactcagaaagcactaaaatctaggtggtgattcagggaggagcaggggaagacagcctcctatggtggcatgaataagatgcttccagaactagtagggaaataactaacctcttcaggctttatcaggcctggaggggaaccttgctcatgttagcaagaaaggtatcctagagaagccactcaaaaggctccctaatccagcctgtctccacatacatactgaaaattcttccctactctgaggcagggtgtagtggtttaggggtttctccagactggaatcctacctatctgtaccgacaattgagcaaacaacagttgagagagtccaaaaaaaaaagtattaaaatgtgattgatgtaatttaccatgtttactttatgcatgcattttattggggaggggaggtcagaataattcacccaaatctagtggtcttatttcataggctaatctggtttatatttgcattaaagatactggagggcaatatttacagagtttagtttttcttaattaaaaacagtcctctattaatatagtgtgaaatatctttcaaaatttagagtttaggtttaagatgtctactagatatctttaagattttcctgtaaactcactgcacaaactggaattactttccaaaagacttagggaatgcaaatatgttactcataagatgcattgagtattgtaaataaaacaaaccatttttgatttgtttaaattgctcgttacagttctcttgtggggagggactttgtcagtcattttgcatcttaagctagactaaactttttgttgttgttttcctaaaaccataggtgcaagctttgccgctgggaagtcatattgaattaagcacttttgaaaatgtcactgtttgtgacacacaatgttctctacagaaaacttcttctatcttatgtcattttagcagtagatgtagctgcctgccaccaggtgcaatatgtcatttgcatcagccttttcagttaaggaaattaaaacttggcatgcattagttcatatgtatgaggttggctgtgtccccaaacagcaattgcttgtacaagatagaagtttgcttctcagctgggcatggtggctcatgcctgtaatccaagctctttgggaggccaacgcgggaggattgtttgagcccaggagtttgaaaccatcctgagcaatagagagacccccatctcgacaaaaaaaaaaaaaaaaaattagaaacaaaaaaaagattgtttctctttcatattaaagtttgggaaggcaatccagagcccatatgacattatgcagggtcagggatccgggttctttctatattgttcctccccattctcaacctgtagctttttttttttttcttttaatgagatagggtctcactctgttgcccaggctggagtgcagtggcacacttctggctcacttcagcctggaactcccgggctcgagctatattctcccactttagcctcagcctccagagtacctgggactacaggtacacaccaccatgcctggctaaattttttttttttttttttggtagagatgaggtcattgctatgttgcccaggctggccttgaagtccagggcttaagtgatcctcctgccttggcctcccaaagtgctggtgttacaggtgtgagccaccacacctggccaacatgtggctttcagttcttacttgaagacagctgctctagctagaaacttcctatcggcatctgagccagctggtagagggcattacctcccccacccccaagaacacttcttggaagttacacacaatacataaacttcaatttcaaacagttgcttggtcccactagccatgaagctggatgggacgtaatattctatctgggttgtcatgggccaaattaacattttgagattctgttaggaagatgagaattggataatgggcacctctaacagtgtctgtcagagttgacatacattgtgtatctcctgcaccaaagcatttttgagatcaagtgttcttccagctgagcagaaatttggaaggctattcagtgctgcttagtgtagcagctaataatgttccaacttctatatgatagtttgctttttgttttttgtttttttctagagacagagtctcgttgcccaggctggtctccaattcctgggttcaagcaatcctcctgactcagcctcctaaatgctgggattacaggcatgaaccactgtgcccagtctatatataatagattttagaagaaatttctgccactcagtgactgctttaaattctagagacagaggctgagagaaacttagtagcctgcctgcgcatactgcaagtacagactatataacaagttgaaagagaatcaccctggtatataatattttaaaacatgaaaaaggcattactattgttctggtctaagtactctaacaggacgatgatttctaaccctagcatcatgacatgtatatagtgtgttgtaagacatttgccagctaatagttacagtactgaagcttgtgaatacgttaattgagaaaactttaagcaggttcaaagttatcccatgatagtggcattcttatttgtatatatgtgctttccttttttatttgtatcaaggcatttaaaatgaatatatgtaacatgtacctaagttttaaaagcataataaaatgaacacatctgaaaccacca

SEQ ID NO: 93 - RNA, 2379 nt, Homo sapiens
  source 1..2379: mol_type = mRNA
gacccccgagctgtgctgctcgcggccgccaccgccgggccccggccgtccctggctcccctcctgcctcgagaagggcagggcttctcagaggcttggcgggaaaaagaacggagggagggatcgcgctgagtataaaagccggttttcggggctttatctaactcgctgtagtaattccagcgagaggcagagggagcgagcgggcggccggctagggtggaagagccgggcgagcagagctgcgctgcgggcgtcctgggaagggagatccggagcgaatagggggcttcgcctctggcccagccctcccgctgatcccccagccagcggtccgcaacccttgccgcatccacgaaactttgcccatagcagcgggcgggcactttgcactggaacttacaacacccgagcaaggacgcgactctcccgacgcggggaggctattctgcccatttggggacacttccccgccgctgccaggacccgcttctctgaaaggctctccttgcagctgcttagacgctggatttttttcgggtagtggaaaaccagcagcctcccgcgacgatgcccctcaacgttagcttcaccaacaggaactatgacctcgactacgactcggtgcagccgtatttctactgcgacgaggaggagaacttctaccagcagcagcagcagagcgagctgcagcccccggcgcccagcgaggatatctggaagaaattcgagctgctgcccaccccgcccctgtcccctagccgccgctccgggctctgctcgccctcctacgttgcggtcacacccttctcccttcggggagacaacgacggcggtggcgggagcttctccacggccgaccagctggagatggtgaccgagctgctgggaggagacatggtgaaccagagtttcatctgcgacccggacgacgagaccttcatcaaaaacatcatcatccaggactgtatgtggagcggcttctcggccgccgccaagctcgtctcagagaagctggcctcctaccaggctgcgcgcaaagacagcggcagcccgaaccccgcccgcggccacagcgtctgctccacctccagcttgtacctgcaggatctgagcgccgccgcctcagagtgcatcgacccctcggtggtcttcccctaccctctcaacgacagcagctcgcccaagtcctgcgcctcgcaagactccagcgccttctctccgtcctcggattctctgctctcctcgacggagtcctccccgcagggcagccccgagcccctggtgctccatgaggagacaccgcccaccaccagcagcgactctgaggaggaacaagaagatgaggaagaaatcgatgttgtttctgtggaaaagaggcaggctcctggcaaaaggtcagagtctggatcaccttctgctggaggccacagcaaacctcctcacagcccactggtcctcaagaggtgccacgtctccacacatcagcacaactacgcagcgcctccctccactcggaaggactatcctgctgccaagagggtcaagttggacagtgtcagagtcctgagacagatcagcaacaaccgaaaatgcaccagccccaggtcctcggacaccgaggagaatgtcaagaggcgaacacacaacgtcttggagcgccagaggaggaacgagctaaaacggagcttttttgccctgcgtgaccagatcccggagttggaaaacaatgaaaaggcccccaaggtagttatccttaaaaaagccacagcatacatcctgtccgtccaagcagaggagcaaaagctcatttctgaagaggacttgttgcggaaacgacgagaacagttgaaacacaaacttgaacagctacggaactcttgtgcgtaaggaaaagtaaggaaaacgattccttctaacagaaatgtcctgagcaatcacctatgaacttgtttcaaatgcatgatcaaatgcaacctcacaaccttggctgagtcttgagactgaaagatttagccataatgtaaactgcctcaaattggactttgggcataaaagaacttttttatgcttaccatcttttttttttctttaacagatttgtatttaagaattgtttttaaaaaattttaagatttacacaatgtttctctgtaaatattgccattaaatgtaaataactttaataaaacgtttatagcagttacacagaatttcaatcctagtatatagtacctagtattataggtactataaaccctaattttttttatttaagtacattttgctttttaaagttgatttttttctattgtttttagaaaaaataaaataactggcaaatatatcattgagccaaatcttaaaaaaaaaaaaaaa

SEQ ID NO: 94 - RNA, 4093 nt, Homo sapiens
  source 1..4093: mol_type = mRNA
gtgagagagtgagcgagacagaaagagagagaagtgcaccagcgagccggggcaggaagaggaggtttcgccaccggagcggcccggcgacgcgctgacagcttcccctgcccttcccgtcggtcgggccgccagccgccgcagccctcggcctgcacgcagccaccggccccgctcccggagcccagcgccgccgaggccgcagccgcccggccagtaaggcggcgccgccgcccggccaccgcgcgccctgcgcttccctccgcccgcgctgcggccatggcgcggcgctgactggcctggcccggccccgccgcgctcccgctcgccccgacccgcactcgggcccgcccgggctccggcctgccgccgcctcttccttctccagccggcaggcccgcgccgcttaggagggagagcccacccgcgccaggaggccgaacgcggactcgccacccggcttcagaatggcagaagatgatccatatttgggaaggcctgaacaaatgtttcatttggatccttctttgactcatacaatatttaatccagaagtatttcaaccacagatggcactgccaacagcagatggcccataccttcaaatattagagcaacctaaacagagaggatttcgtttccgttatgtatgtgaaggcccatcccatggtggactacctggtgcctctagtgaaaagaacaagaagtcttaccctcaggtcaaaatctgcaactatgtgggaccagcaaaggttattgttcagttggtcacaaatggaaaaaatatccacctgcatgcccacagcctggtgggaaaacactgtgaggatgggatctgcactgtaactgctggacccaaggacatggtggtcggcttcgcaaacctgggtatacttcatgtgacaaagaaaaaagtatttgaaacactggaagcacgaatgacagaggcgtgtataaggggctataatcctggactcttggtgcaccctgaccttgcctatttgcaagcagaaggtggaggggaccggcagctgggagatcgggaaaaagagctaatccgccaagcagctctgcagcagaccaaggagatggacctcagcgtggtgcggctcatgtttacagcttttcttccggatagcactggcagcttcacaaggcgcctggaacccgtggtatcagacgccatctatgacagtaaagcccccaatgcatccaacttgaaaattgtaagaatggacaggacagctggatgtgtgactggaggggaggaaatttatcttctttgtgacaaagttcagaaagatgacatccagattcgattttatgaagaggaagaaaatggtggagtctgggaaggatttggagatttttcccccacagatgttcatagacaatttgccattgtcttcaaaactccaaagtataaagatattaatattacaaaaccagcctctgtgtttgtccagcttcggaggaaatctgacttggaaactagtgaaccaaaacctttcctctactatcctgaaatcaaagataaagaagaagtgcagaggaaacgtcagaagctcatgcccaatttttcggatagtttcggcggtggtagtggtgctggagctggaggcggaggcatgtttggtagtggcggtggaggagggggcactggaagtacaggtccagggtatagcttcccacactatggatttcctacttatggtgggattactttccatcctggaactactaaatctaatgctgggatgaagcatggaaccatggacactgaatctaaaaaggaccctgaaggttgtgacaaaagtgatgacaaaaacactgtaaacctctttgggaaagttattgaaaccacagagcaagatcaggagcccagcgaggccaccgttgggaatggtgaggtcactctaacgtatgcaacaggaacaaaagaagagagtgctggagttcaggataacctctttctagagaaggctatgcagcttgcaaagaggcatgccaatgcccttttcgactacgcggtgacaggagacgtgaagatgctgctggccgtccagcgccatctcactgctgtgcaggatgagaatggggacagtgtcttacacttagcaatcatccaccttcattctcaacttgtgagggatctactagaagtcacatctggtttgatttctgatgacattatcaacatgagaaatgatctgtaccagacgcccttgcacttggcagtgatcactaagcaggaagatgtggtggaggatttgctgagggctggggccgacctgagccttctggaccgcttgggtaactctgttttgcacctagctgccaaagaaggacatgataaagttctcagtatcttactcaagcacaaaaaggcagcactacttcttgaccaccccaacggggacggtctgaatgccattcatctagccatgatgagcaatagcctgccatgtttgctgctgctggtggccgctggggctgacgtcaatgctcaggagcagaagtccgggcgcacagcactgcacctggctgtggagcacgacaacatctcattggcaggctgcctgctcctggagggtgatgcccatgtggacagtactacctacgatggaaccacacccctgcatatagcagctgggagagggtccaccaggctggcagctcttctcaaagcagcaggagcagatcccctggtggagaactttgagcctctctatgacctggatgactcttgggaaaatgcaggagaggatgaaggagttgtgcctggaaccacgcctctagatatggccaccagctggcaggtatttgacatattaaatgggaaaccatatgagccagagtttacatctgatgatttactagcacaaggagacatgaaacagctggctgaagatgtgaagctgcagctgtataagttactagaaattcctgatccagacaaaaactgggctactctggcgcagaaattaggtctggggatacttaataatgccttccggctgagtcctgctccttccaaaacacttatggacaactatgaggtctctgggggtacagtcagagagctggtggaggccctgagacaaatgggctacaccgaagcaattgaagtgatccaggcagcctccagcccagtgaagaccacctctcaggcccactcgctgcctctctcgcctgcctccacaaggcagcaaatagacgagctccgagacagtgacagtgtctgcgacagcggcgtggagacatccttccgcaaactcagctttaccgagtctctgaccagtggtgcctcactgctaactctcaacaaaatgccccatgattatgggcaggaaggacctctagaaggcaaaatttagcctgctgacaatttcccacaccgtgtaaaccaaagccctaaaattccactgcgttgtccacaagacagaagctgaagtgcatccaaaggtgctcagagagccggcccgcctgaatcattctcgatttaactcgagaccttttcaacttggcttcctttcttggttcataaatgaattttagtttggttcacttacagatagtatctagcaatcacaacactggctgagcggatgcatctggggatgaggttgcttactaagctttgccagctgctgctggatcacagctgctttctgttgtcattgctgttgtccctctgctacgttcctattgtcattaaaggtatcacggtcgccacctggcattccttctgaccacagcatcattttgcattcaaattaagggttaagaaaagagatattttaaaatgagagtcacttgatgtgccattttaaaaaaaaaggcatattgctttttctaatgtggttatttctctgatttgcaaaaaaaaaaaaaaaaaaaatacttgtcaatatttaaacatggttacaatcattgctgaaaatggtattttcccccttttctgcattttgctattgtaaatatgttttttagatcaaatactttaaaggaaaaaatgttggatttataaatgctattttttattttacttttataataaaaggaaaagcaaattgatgacctcaaaaaaaaa

SEQ ID NO: 95 - RNA, 4454 nt, Homo sapiens
  source 1..4454: mol_type = mRNA
gaaacgtcccgtgtgggaggggcgggtctgggtgcggcctgccgcatgactcgtggttcggaggcccacgtggccggggcggggactcaggcgcctggggcgccgactgattacgtagcgggcggggccggaagtgccgctccttggtgggggctgttcatggcggttccggggtctccaacatttttcccggctgtggtcctaaatctgtccaaagcagaggcagtggagcttgaggttcttgctggtgtgaaatgactgagtacaaactggtggtggttggagcaggtggtgttgggaaaagcgcactgacaatccagctaatccagaaccactttgtagatgaatatgatcccaccatagaggattcttacagaaaacaagtggttatagatggtgaaacctgtttgttggacatactggatacagctggacaagaagagtacagtgccatgagagaccaatacatgaggacaggcgaaggcttcctctgtgtatttgccatcaataatagcaagtcatttgcggatattaacctctacagggagcagattaagcgagtaaaagactcggatgatgtacctatggtgctagtgggaaacaagtgtgatttgccaacaaggacagttgatacaaaacaagcccacgaactggccaagagttacgggattccattcattgaaacctcagccaagaccagacagggtgttgaagatgctttttacacactggtaagagaaatacgccagtaccgaatgaaaaaactcaacagcagtgatgatgggactcagggttgtatgggattgccatgtgtggtgatgtaacaagatacttttaaagttttgtcagaaaagagccactttcaagctgcactgacaccctggtcctgacttccctggaggagaagtattcctgttgctgtcttcagtctcacagagaagctcctgctacttccccagctctcagtagtttagtacaataatctctatttgagaagttctcagaataactacctcctcacttggctgtctgaccagagaatgcacctcttgttactccctgttatttttctgccctgggttcttccacagcacaaacacacctctgccaccccaggtttttcatctgaaaagcagttcatgtctgaaacagagaaccaaaccgcaaacgtgaaattctattgaaaacagtgtcttgagctctaaagtagcaactgctggtgattttttttttctttttactgttgaacttagaactatgctaatttttggagaaatgtcataaattactgttttgccaagaatatagttattattgctgtttggtttgtttataatgttatcggctctattctctaaactggcatctgctctagattcataaatacaaaaatgaatactgaattttgagtctatcctagtcttcacaactttgacgtaattaaatccaactttcacagtgaagtgcctttttcctagaagtggtttgtagacttcctttataatatttcagtggaatagatgtctcaaaaatccttatgcatgaaatgaatgtctgagatacgtctgtgacttatctaccattgaaggaaagctatatctatttgagagcagatgccattttgtacatgtatgaaattggttttccagaggcctgttttggggctttcccaggagaaagatgaaactgaaagcacatgaataatttcacttaataatttttacctaatctccacttttttcataggttactacctatacaatgtatgtaatttgtttcccctagcttactgataaacctaatattcaatgaacttccatttgtattcaaatttgtgtcataccagaaagctctacatttgcagatgttcaaatattgtaaaactttggtgcattgttatttaatagctgtgatcagtgattttcaaacctcaaatatagtatattaacaaattacattttcactgtatatcatggtatcttaatgatgtatataattgccttcaatccccttctcaccccaccctctacagcttcccccacagcaataggggcttgattatttcagttgagtaaagcatggtgctaatggaccagggtcacagtttcaaaacttgaacaatccagttagcatcacagagaaagaaattcttctgcatttgctcattgcaccagtaactccagctagtaattttgctaggtagctgcagttagccctgcaaggaaagaagaggtcagttagcacaaaccctttaccatgactggaaaactcagtatcacgtatttaaacatttttttttcttttagccatgtagaaactctaaattaagccaatattctcatttgagaatgaggatgtctcagctgagaaacgttttaaattctctttattcataatgttctttgaagggtttaaaacaagatgttgataaatctaagctgatgagtttgctcaaaacaggaagttgaaattgttgagacaggaatggaaaatataattaattgatacctatgaggatttggaggcttggcattttaatttgcagataataccctggtaattctcatgaaaaatagacttggataacttttgataaaagactaattccaaaatggccactttgttcctgtctttaatatctaaatacttactgaggtcctccatcttctatattatgaattttcatttattaagcaaatgtcatattaccttgaaattcagaagagaagaaacatatactgtgtccagagtataatgaacctgcagagttgtgcttcttactgctaattctgggagctttcacagtactgtcatcatttgtaaatggaaattctgcttttctgtttctgctccttctggagcagtgctactctgtaattttcctgaggcttatcacctcagtcatttcttttttaaatgtctgtgactggcagtgattctttttcttaaaaatctattaaatttgatgtcaaattagggagaaagatagttactcatcttgggctcttgtgccaatagcccttgtatgtatgtacttagagttttccaagtatgttctaagcacagaagtttctaaatggggccaaaattcagacttgagtatgttctttgaataccttaagaagttacaattagccgggcatggtggcccgtgcctgtagtcccagctacttgagaggctgaggcaggagaatcacttcaacccaggaggtggaggttacagtgagcagagatcgtgccactgcactccagcctgggtgacaagagagacttgtctccaaaaaaaaagttacacctaggtgtgaattttggcacaaaggagtgacaaacttatagttaaaagctgaataacttcagtgtggtataaaacgtggtttttaggctatgtttgtgattgctgaaaagaattctagtttacctcaaaatccttctctttccccaaattaagtgcctggccagctgtcataaattacatattccttttggtttttttaaaggttacatgttcaagagtgaaaataagatgttctgtctgaaggctaccatgccggatctgtaaatgaacctgttaaatgctgtatttgctccaacggcttactatagaatgttacttaatacaatatcatacttattacaatttttactataggagtgtaataggtaaaattaatctctattttagtgggcccatgtttagtctttcaccatcctttaaactgctgtgaatttttttgtcatgacttgaaagcaaggatagagaaacactttagagatatgtggggtttttttaccattccagagcttgtgagcataatcatatttgctttatatttatagtcatgaactcctaagttggcagctacaaccaagaaccaaaaaatggtgcgttctgcttcttgtaattcatctctgctaataaattataagaagcaaggaaaattagggaaaatattttatttggatggtttctataaacaagggactataattcttgtacattatttttcatctttgctgtttctttgagcagtctaatgtgccacacaattatctaaggtatttgttttctataagaattgttttaaaagtattcttgttaccagagtagttgtattatatttcaaaacgtaagatgatttttaaaagcctgagtactgacctaagatggaattgtatgaactctgctctggagggaggggaggatgtccgtggaagttgtaagacttttatttttttgtgccatcaaatataggtaaaaataattgtgcaattctgctgtttaaacaggaactattggcctccttggccctaaatggaagggccgatattttaagttgattattttattgtaaattaatccaacctagttctttttaatttggttgaatgttttttcttgttaaatgatgtttaaaaaataaaaactggaagttcttggcttagtcataattctt

SEQ ID NO: 96 - RNA, 6413 nt, Homo sapiens
  source 1..6413: mol_type = mRNA
agaaatcagagacgctgcctgcctgctcccatctctcgcgcgctctctctctcttctgctctctccctccctttgcaaacattggatttaaacctgctcagaattcagcacagaggaaggcagcagcggtagcagcagcagaagcagtagcaagcccggcagctgagagcaccgcagcgtcgagatgtaccatcctgcctactgggtcgtcttctcggcgacaactgccctgctcttcatcccaggagtgcccgtgcgcagcggagatgccaccttccccaaagctatggacaacgtgacggtccggcagggggagagcgccaccctcaggtgtaccatagatgaccgggtaacccgggtggcctggctaaaccgcagcaccatcctctacgctgggaatgacaagtggtccatagaccctcgtgtgatcatcctggtcaatacaccaacccagtacagcatcatgatccaaaatgtggatgtgtatgacgaaggtccgtacacctgctctgtgcagacagacaatcatcccaaaacgtcccgggttcacctaatagtgcaagttcctcctcagatcatgaatatctcctcagacatcactgtgaatgagggaagcagtgtgaccctgctgtgtcttgctattggcagaccagagccaactgtgacatggagacacctgtcagtcaaggaaggccagggctttgtaagtgaggatgagtacctggagatctctgacatcaagcgagaccagtccggggagtacgaatgcagcgcgttgaacgatgtcgctgcgcccgatgtgcggaaagtaaaaatcactgtaaactatcctccctatatctcaaaagccaagaacactggtgtttcagtcggtcagaagggcatcctgagctgtgaagcctctgcagtccccatggctgaattccagtggttcaaggaagaaaccaggttagccactggtctggatggaatgaggattgaaaacaaaggccgcatgtccactctgactttcttcaatgtttcagaaaaggattatgggaactatacttgtgtggccacgaacaagcttgggaacaccaatgccagcatcacattgtatgggcctggagcagtcattgatggtgtaaactcggcctccagagcactggcttgtctctggctatcagggaccctcttagcccacttcttcatcaagttttgataagaaatcctaggtcctctgagcaacgcctgcttctccatatcacagactttaatctacactgcggagagcaaaccagcttgggcttctttttgtttttttctgttattctagatttgttttctttttgtttttgtttatttgtttgtttgcttttatttccagcttgaatgagtggggttgggggcggggtgggcagggttctaccacgtgtaggataatcattcattggtgtgtccaaaaatggggtctgctcctgctaccttgacccttccctttcctctgcttctctcctcatcatcattcccaacaacatcctctgccacacacaacaaaacgtaagtttcatttgggcaaaaattgagcctcacaataaacaccctgaagacacaacttgacttataacatagtgcacagcaagagctacatccaagtgtcctattatctgtgattattttcttaatgacaatgtacatatgcccccatccatgttaattattatctaattccattagggttcacgtcttttctttctgggacactatcctactatatccatatctatagatttcaatatagatgattgtgccatcttctgtagcccctccgctctactcattccttccaccatctgcagagatttgaagtttggggctatgcatgaaacccaacactaaattttgcaagtcaagtaaccaaaaaagggggaggcattttgaagatagaacctctattttaaaaagagaagttcaactcataaacgtgattgataggtggctgatttatttaggttttgtcaagctatctatcaaagtaatggtacagttacccatctactcaaatatctgatttatctcaccatccaattatctacccacctgtcttcctctctagcaatctatttactgtttatcaatctatcaatgtaattgtctaacactcctttctattctctccctactactcactatcaattcatccccatatgaatctctaaccatattgtatctctcccactgtattcatttatacaccatcagcagacattggcatcttcaaaattatctttcaacttctgtgaaagccaacgatctcacaggttaacaaaatacaaaagcaataccctgtgttgtggactctttaaaatctggtatcctatccacccaagggagacactaacagataggccaaagtagcaagctaatgatcagtcactcactattcccagaagagcctgtgttttctaaaacactttcttgggaagcagatcagcctagaaaagttttgattagcactgtggttttccttttgcacttgaaggacaaaggtgccagcctttatgcttctctcaacccttcaagaaagtacatgtcaggaacctatggctggctttccttagcagcaagaacttgagagaaaaacacatctgtctctgcaatgcaaagtgaagagtccacccgcctgagtgggatgacttcagctagagtctcctttctgctccagttctggtttaatctgtttgaaaactatccagtaaaaagctgatggaggccaattacatggcgggtgtattgacaactctggtatttgtttcaggaagctcttctaagctgagggcacttgagcaactgacttaattttcaagcacttgattaacacaacactgcaaacagaagggagaaagtgtcagtgacacagtttcctctgatgcagctgcttctccaatggctttggggaagaacttcaccagctcttcaggttcaaagcagacccagcatacaaacaagagctgagccacctttgctgtcttgtctcctgggacgagaaggactcatccagcaaagttgcctgggattcaaaataaaggcattgcagaccgcacaggtgtgctgcagggactgatccacagagaggatgagaatgcagcatcaatcgcagacctgccctgcctcagttggaaaaccttttcaggccctcagtctaaaaaataaaaaatatgagcaccattgaattctgtgcccttaatgcttaactggtcttcttcctctggtatcagtgtcctctttgtttttgtccatcaaggcacatgagtgtgacctctgccatggggaaacacacacagagatatctatacatatatacatacatacaaacataggctatcttggcacactaaatgctaagcactgtcttaagaggtagagctggtgtgagtgaaattaatgttacattttccagctgtaaacagacatctgcatttcctagtgagctgccaggagccagattcgggaaccgtaactgatgtgccaggaatggtgcattgattcccagttccagggatgatcatgagcaggcgcaaaatcagaattaaaggtcgcacatagacgtttcagatctgtcaccaccttcagcatctggagttgagttggtgtcagatagtgtatgagaattaaatgtgtcatctgagcatgctactgatgataaatttgttactttggagttgaataaatgtgaaggctgtgaagagtggacagtcttggagaacacagtgcttgaaatggacaagctggacctattcctcactccaagacttgttctacaggaaagggtccatgctcctttggccaagatcatcagaacctctcaacccaacaaggctggcttcagggccactatggaaccctgctgttcccccttccaaaggatactaagatgcccctctggtgggtacctatcccagccacgtttcagagggagagaaatgctacagttgatcctcatctgtctggggtaaagacaacaaagtaaatacaacccaaggcaactggggtactcactgggagtgaaaatgacttcttcacaacagacatatttctgcttctgtgtttttgtgtttctttggtggggatggcttcatgggagagtggctgtcacccatcattttgaagcatatagaacaacaaatgcttacacaagacaatatccacacttttccaacttcacacacggagagtacatggagaatgcctacaggctagatttgttcagggtgccagtagtgggcatggggtgggggcaaggcaggacaaaacatacaagtctgagcaagtacatctcttgcaggttttccacatgaaaaggaagccaaataagtcctgttaggagattaggtgagaggaattagcaatgtagggactctgaaacccttccccttcccaaaacagagttcatatgcacttccaccaaagtaatgccaatgaaagtgctcgtgttaaggctgcagccaagcttgtttttcagtagtttaatgtcaagtgcctgatacagtcgactgcaagtctaaacaagcatgtttagtttttctcattcttgctttaattcagggagggggagatgtagagaagtggttgtgaaaacatgtacaggctttatgcagagcactgcgcatggctgttctgctgcaactgtgctccacgaaacagaagaaaaggtaaggtgttgtgtcacaaagaggccccagtctctttcttcttacatccatgcctcttactagatgatacatttacagattgggcagtttgttctcaaaacctgggtgagaagactattcctggactctagcaacttcaaaactgaggctgggtttcagaatctttttctgcatcaattcagtcaatttgccttcaacaaagagaagtcagcaagttctatttatgctgaaagaactattccatgagaaaagcagagaaccccaaagtgggcaggcaaccccgacgagagcttatccctgtggcggcatcaggagtggctgtacattgaattttcaagtgctggttggctgtcgccagcccatggtaggaggggaggaatggcttaagatgaggtaagatctggtggtggggcatctttcctcaattccatactgactttgatcttgagaaagaaaaactggctatgcattacctaaaaccagtccaaaatgaaacagaccaacacacacacaaaagcaaattgtcaatccctttggaattaagggaagcagcataaggtttttctttttggaaaaaatgcatttattttctttttctccaacagcaagaatcttttgttttcattttgcacgtgaccttatcttggaaactcttatacccaattgcctcccctcctattattcagagcttccctgtctttttacttgaagacaaataagtttgagcacttgagtaaaacttcacaggtgtgtaagtaggaaggcaacattttcaaaaagagaccatatgatgagaacgcctaatgatcaccacatgcaaacaaacaaaactgccagtctcatttcccacatttcttacttaagagaagagaagtaaatgaaaggaagaagaaatagatttgtaattaaagatgtggcaaaaaagatagggctgagccagttcaatttagccttcaggtgcagaatacttagagtccaaagaaatgtggagtggacttaattagatgcagttgtctttatcctgaaagtagtgagctaagcctaatttccagcattttgaaagagattcctttttgtttctttccatggtgccctctttaaggcacagagttgctccacaccactgggtggagaaagaaagattgcgaaccctcgaccatccttttgaggctacattctatgttatttggcagatttataaagctatcagtaataacaatgctatgtactgcaagctgcccttgtgttagttaaagggagcatttttaatcgttcggaaattttcgtgacatgtcaagtgcagttgtgaggactgtgtgggtgaacgaaaatgtgtctgtcaagttcagagtcctttagatttaaaaaaaaattatgacttatcaatggtgccgttatagctgtgtcagacaatgggtgtgcccattctcacaattatccttcaaaaaaaatctatgttcaaatgctttaaaaatttatcacacgatacaagagtatgactttgtcagccttctagagttctttttttcttttattttctttcgtattttttccttcaaaaaatcaatgaagacttgatttctgtcaataattgtatcaagggtgaatatactacctgaattttgtgcatgttacattgtagttgtaaccttttctaattcaggatgaatacgagatggttgtgattgtgcagtgtaccaataaagttcgagaaatttgtaa

SEQ ID NO: 97 - RNA, 6574 nt, Homo sapiens
  source 1..6574: mol_type = mRNA
aagagcaaaaagcgaaggcgcaatctggacactgggagattcggagcgcagggagtttgagagaaacttttattttgaagagaccaaggttgagggggggcttatttcctgacagctatttacttagagcaaatgattagttttagaaggatggactataacattgaatcaattacaaaacgcggtttttgagcccattactgttggagctacagggagagaaacagaggaggagactgcaagagatcattggaggccgtgggcacgctctttactccatgtgtgggacattcattgcggaataacatcggaggagaagtttcccagagctatggggacttcccatccggcgttcctggtcttaggctgtcttctcacagggctgagcctaatcctctgccagctttcattaccctctatccttccaaatgaaaatgaaaaggttgtgcagctgaattcatccttttctctgagatgctttggggagagtgaagtgagctggcagtaccccatgtctgaagaagagagctccgatgtggaaatcagaaatgaagaaaacaacagcggcctttttgtgacggtcttggaagtgagcagtgcctcggcggcccacacagggttgtacacttgctattacaaccacactcagacagaagagaatgagcttgaaggcaggcacatttacatctatgtgccagacccagatgtagcctttgtacctctaggaatgacggattatttagtcatcgtggaggatgatgattctgccattataccttgtcgcacaactgatcccgagactcctgtaaccttacacaacagtgagggggtggtacctgcctcctacgacagcagacagggctttaatgggaccttcactgtagggccctatatctgtgaggccaccgtcaaaggaaagaagttccagaccatcccatttaatgtttatgctttaaaagcaacatcagagctggatctagaaatggaagctcttaaaaccgtgtataagtcaggggaaacgattgtggtcacctgtgctgtttttaacaatgaggtggttgaccttcaatggacttaccctggagaagtgaaaggcaaaggcatcacaatgctggaagaaatcaaagtcccatccatcaaattggtgtacactttgacggtccccgaggccacggtgaaagacagtggagattacgaatgtgctgcccgccaggctaccagggaggtcaaagaaatgaagaaagtcactatttctgtccatgagaaaggtttcattgaaatcaaacccaccttcagccagttggaagctgtcaacctgcatgaagtcaaacattttgttgtagaggtgcgggcctacccacctcccaggatatcctggctgaaaaacaatctgactctgattgaaaatctcactgagatcaccactgatgtggaaaagattcaggaaataaggtatcgaagcaaattaaagctgatccgtgctaaggaagaagacagtggccattatactattgtagctcaaaatgaagatgctgtgaagagctatacttttgaactgttaactcaagttccttcatccattctggacttggtcgatgatcaccatggctcaactgggggacagacggtgaggtgcacagctgaaggcacgccgcttcctgatattgagtggatgatatgcaaagatattaagaaatgtaataatgaaacttcctggactattttggccaacaatgtctcaaacatcatcacggagatccactcccgagacaggagtaccgtggagggccgtgtgactttcgccaaagtggaggagaccatcgccgtgcgatgcctggctaagaatctccttggagctgagaaccgagagctgaagctggtggctcccaccctgcgttctgaactcacggtggctgctgcagtcctggtgctgttggtgattgtgatcatctcacttattgtcctggttgtcatttggaaacagaaaccgaggtatgaaattcgctggagggtcattgaatcaatcagcccagatggacatgaatatatttatgtggacccgatgcagctgccttatgactcaagatgggagtttccaagagatggactagtgcttggtcgggtcttggggtctggagcgtttgggaaggtggttgaaggaacagcctatggattaagccggtcccaacctgtcatgaaagttgcagtgaagatgctaaaacccacggccagatccagtgaaaaacaagctctcatgtctgaactgaagataatgactcacctggggccacatttgaacattgtaaacttgctgggagcctgcaccaagtcaggccccatttacatcatcacagagtattgcttctatggagatttggtcaactatttgcataagaatagggatagcttcctgagccaccacccagagaagccaaagaaagagctggatatctttggattgaaccctgctgatgaaagcacacggagctatgttattttatcttttgaaaacaatggtgactacatggacatgaagcaggctgatactacacagtatgtccccatgctagaaaggaaagaggtttctaaatattccgacatccagagatcactctatgatcgtccagcctcatataagaagaaatctatgttagactcagaagtcaaaaacctcctttcagatgataactcagaaggccttactttattggatttgttgagcttcacctatcaagttgcccgaggaatggagtttttggcttcaaaaaattgtgtccaccgtgatctggctgctcgcaacgtcctcctggcacaaggaaaaattgtgaagatctgtgactttggcctggccagagacatcatgcatgattcgaactatgtgtcgaaaggcagtacctttctgcccgtgaagtggatggctcctgagagcatctttgacaacctctacaccacactgagtgatgtctggtcttatggcattctgctctgggagatcttttcccttggtggcaccccttaccccggcatgatggtggattctactttctacaataagatcaagagtgggtaccggatggccaagcctgaccacgctaccagtgaagtctacgagatcatggtgaaatgctggaacagtgagccggagaagagaccctccttttaccacctgagtgagattgtggagaatctgctgcctggacaatataaaaagagttatgaaaaaattcacctggacttcctgaagagtgaccatcctgctgtggcacgcatgcgtgtggactcagacaatgcatacattggtgtcacctacaaaaacgaggaagacaagctgaaggactgggagggtggtctggatgagcagagactgagcgctgacagtggctacatcattcctctgcctgacattgaccctgtccctgaggaggaggacctgggcaagaggaacagacacagctcgcagacctctgaagagagtgccattgagacgggttccagcagttccaccttcatcaagagagaggacgagaccattgaagacatcgacatgatggatgacatcggcatagactcttcagacctggtggaagacagcttcctgtaactggcggattcgaggggttccttccacttctggggccacctctggatcccgttcagaaaaccactttattgcaatgcagaggttgagaggaggacttggttgatgtttaaagagaagttcccagccaagggcctcggggagcgttctaaatatgaatgaatgggatattttgaaatgaactttgtcagtgttgcctcttgcaatgcctcagtagcatctcagtggtgtgtgaagtttggagatagatggataagggaataataggccacagaaggtgaactttgtgcttcaaggacattggtgagagtccaacagacacaatttatactgcgacagaacttcagcattgtaattatgtaaataactctaaccaaggctgtgtttagattgtattaactatcttctttggacttctgaagagaccactcaatccatccatgtacttccctcttgaaacctgatgtcagctgctgttgaactttttaaagaagtgcatgaaaaaccatttttgaaccttaaaaggtactggtactatagcattttgctatcttttttagtgttaaagagataaagaataataattaaccaaccttgtttaatagatttgggtcatttagaagcctgacaactcattttcatattgtaatctatgtttataatactactactgttatcagtaatgctaaatgtgtaataatgtaacatgatttccctccagagaaagcacaatttaaaacaatccttactaagtaggtgatgagtttgacagtttttgacatttatattaaataacatgtttctctataaagtatggtaatagctttagtgaattaaatttagttgagcatagagaacaaagtaaaagtagtgttgtccaggaagtcagaatttttaactgtactgaataggttccccaatccatcgtattaaaaaacaattaactgccctctgaaataatgggattagaaacaaacaaaactcttaagtcctaaaagttctcaatgtagaggcataaacctgtgctgaacataacttctcatgtatattacccaatggaaaatataatgatcagcaaaaagactggatttgcagaagttttttttttttttttcttcatgcctgatgaaagctttggcgaccccaatatatgtattttttgaatctatgaacctgaaaagggtcagaaggatgcccagacatcagcctccttctttcaccccttaccccaaagagaaagagtttgaaactcgagaccataaagatattctttagtggaggctggatgtgcattagcctggatcctcagttctcaaatgtgtgtggcagccaggatgactagatcctgggtttccatccttgagattctgaagtatgaagtctgagggaaaccagagtctgtatttttctaaactccctggctgttctgatcggccagttttcggaaacactgacttaggtttcaggaagttgccatgggaaacaaataatttgaactttggaacagggttggcattcaaccacgcaggaagcctactatttaaatccttggcttcaggttagtgacatttaatgccatctagctagcaattgcgaccttaatttaactttccagtcttagctgaggctgagaaagctaaagtttggttttgacaggttttccaaaagtaaagatgctacttcccactgtatgggggagattgaactttccccgtctcccgtcttctgcctcccactccataccccgccaaggaaaggcatgtacaaaaattatgcaattcagtgttccaagtctctgtgtaaccagctcagtgttttggtggaaaaaacattttaagttttactgataatttgaggttagatgggaggatgaattgtcacatctatccacactgtcaaacaggttggtgtgggttcattggcattctttgcaatactgcttaattgctgataccatatgaatgaaacatgggctgtgattactgcaatcactgtgctatcggcagatgatgctttggaagatgcagaagcaataataaagtacttgactacctactggtgtaatctcaatgcaagccccaactttcttatccaactttttcatagtaagtgcgaagactgagccagattggccaattaaaaacgaaaacctgactaggttctgtagagccaattagacttgaaatacgtttgtgtttctagaatcacagctcaagcattctgtttatcgctcactctcccttgtacagccttattttgttggtgctttgcattttgatattgctgtgagccttgcatgacatcatgaggccggatgaaacttctcagtccagcagtttccagtcctaacaaatgctcccacctgaatttgtatatgactgcatttgtgtgtgtgtgtgtgttttcagcaaattccagatttgtttccttttggcctcctgcaaagtctccagaagaaaatttgccaatctttcctactttctatttttatgatgacaatcaaagccggcctgagaaacactatttgtgactttttaaacgattagtgatgtccttaaaatgtggtctgccaatctgtacaaaatggtcctatttttgtgaagagggacataagataaaatgatgttatacatcaatatgtatatatgtatttctatatagacttggagaatactgccaaaacatttatgacaagctgtatcactgccttcgtttatatttttttaactgtgataatccccacaggcacattaactgttgcacttttgaatgtccaaaatttatattttagaaataataaaaagaaagatacttacatgttcccaaaacaatggtgtggtgaatgtgtgagaaaaactaacttgatagggtctaccaatacaaaatgtattacgaatgcccctgttcatgtttttgttttaaaacgtgtaaatgaagatctttatatttcaataaatgatatataatttaaagtta

SEQ ID NO: 98 - RNA, 1138 nt, Homo sapiens
  source 1..1138: mol_type = mRNA
ggaccgttagggagcccaatgggcgtcgccgccaggccccgttgcagagcgcgtctagccaataggcagcggcggcgggcgggcgcgggcgacaggcggcgcagctgaggcggagcaggcgctgcggcaggagggaagatggcggacgaggagaagctgccgcccggctgggagaagcgcatgagccgcagctcaggccgagtgtactacttcaaccacatcactaacgccagccagtgggagcggcccagcggcaacagcagcagtggtggcaaaaacgggcagggggagcctgccagggtccgctgctcgcacctgctggtgaagcacagccagtcacggcggccctcgtcctggcggcaggagaagatcacccggaccaaggaggaggccctggagctgatcaacggctacatccagaagatcaagtcgggagaggaggactttgagtctctggcctcacagttcagcgactgcagctcagccaaggccaggggagacctgggtgccttcagcagaggtcagatgcagaagccatttgaagacgcctcgtttgcgctgcggacgggggagatgagcgggcccgtgttcacggattccggcatccacatcatcctccgcactgagtgagggtggggagcccaggcctggcctcggggcagggcagggcggctaggccggccagctcccccttgcccgccagccagtggccgaaccccccactccctgccaccgtcacacagtatttattgttcccacaatggctgggagggggcccttccagattgggggccctggggtccccactccctgtccatccccagttggggctgcgaccgccagattctcccttaaggaattgacttcagcaggggtgggaggctcccagacccagggcagtgtggtgggaggggtgttccaaagagaaggcctggtcagcagagccgccccgtgtccccccaggtgctggaggcagactcgagggccgaattgtttctagttaggccacgctcctctgttcagtcgcaaaggtgaacactcatgcggcccagccatgggccctctgagcaactgtgcagcaccctttcacccccaattaaacccagaaccactgctctgcaaaaaaaaaaaaaaaaaa

SEQ ID NO: 99 - RNA, 4507 nt, Homo sapiens
  source 1..4507: mol_type = mRNA
gaccaattgtcatacgacttgcagtgagcgtcaggagcacgtccaggaactcctcagcagcgcctccttcagctccacagccagacgccctcagacagcaaagcctacccccgcgccgcgccctgcccgccgctgcgatgctcgcccgcgccctgctgctgtgcgcggtcctggcgctcagccatacagcaaatccttgctgttcccacccatgtcaaaaccgaggtgtatgtatgagtgtgggatttgaccagtataagtgcgattgtacccggacaggattctatggagaaaactgctcaacaccggaatttttgacaagaataaaattatttctgaaacccactccaaacacagtgcactacatacttacccacttcaagggattttggaacgttgtgaataacattcccttccttcgaaatgcaattatgagttatgtgttgacatccagatcacatttgattgacagtccaccaacttacaatgctgactatggctacaaaagctgggaagccttctctaacctctcctattatactagagcccttcctcctgtgcctgatgattgcccgactcccttgggtgtcaaaggtaaaaagcagcttcctgattcaaatgagattgtggaaaaattgcttctaagaagaaagttcatccctgatccccagggctcaaacatgatgtttgcattctttgcccagcacttcacgcatcagtttttcaagacagatcataagcgagggccagctttcaccaacgggctgggccatggggtggacttaaatcatatttacggtgaaactctggctagacagcgtaaactgcgccttttcaaggatggaaaaatgaaatatcagataattgatggagagatgtatcctcccacagtcaaagatactcaggcagagatgatctaccctcctcaagtccctgagcatctacggtttgctgtggggcaggaggtctttggtctggtgcctggtctgatgatgtatgccacaatctggctgcgggaacacaacagagtatgcgatgtgcttaaacaggagcatcctgaatggggtgatgagcagttgttccagacaagcaggctaatactgataggagagactattaagattgtgattgaagattatgtgcaacacttgagtggctatcacttcaaactgaaatttgacccagaactacttttcaacaaacaattccagtaccaaaatcgtattgctgctgaatttaacaccctctatcactggcatccccttctgcctgacacctttcaaattcatgaccagaaatacaactatcaacagtttatctacaacaactctatattgctggaacatggaattacccagtttgttgaatcattcaccaggcaaattgctggcagggttgctggtggtaggaatgttccacccgcagtacagaaagtatcacaggcttccattgaccagagcaggcagatgaaataccagtcttttaatgagtaccgcaaacgctttatgctgaagccctatgaatcatttgaagaacttacaggagaaaaggaaatgtctgcagagttggaagcactctatggtgacatcgatgctgtggagctgtatcctgcccttctggtagaaaagcctcggccagatgccatctttggtgaaaccatggtagaagttggagcaccattctccttgaaaggacttatgggtaatgttatatgttctcctgcctactggaagccaagcacttttggtggagaagtgggttttcaaatcatcaacactgcctcaattcagtctctcatctgcaataacgtgaagggctgtccctttacttcattcagtgttccagatccagagctcattaaaacagtcaccatcaatgcaagttcttcccgctccggactagatgatatcaatcccacagtactactaaaagaacgttcgactgaactgtagaagtctaatgatcatatttatttatttatatgaaccatgtctattaatttaattatttaataatatttatattaaactccttatgttacttaacatcttctgtaacagaagtcagtactcctgttgcggagaaaggagtcatacttgtgaagacttttatgtcactactctaaagattttgctgttgctgttaagtttggaaaacagtttttattctgttttataaaccagagagaaatgagttttgacgtctttttacttgaatttcaacttatattataagaacgaaagtaaagatgtttgaatacttaaacactgtcacaagatggcaaaatgctgaaagtttttacactgtcgatgtttccaatgcatcttccatgatgcattagaagtaactaatgtttgaaattttaaagtacttttggttatttttctgtcatcaaacaaaaacaggtatcagtgcattattaaatgaatatttaaattagacattaccagtaatttcatgtctactttttaaaatcagcaatgaaacaataatttgaaatttctaaattcatagggtagaatcacctgtaaaagcttgtttgatttcttaaagttattaaacttgtacatataccaaaaagaagctgtcttggatttaaatctgtaaaatcagtagaaattttactacaattgcttgttaaaatattttataagtgatgttcctttttcaccaagagtataaacctttttagtgtgactgttaaaacttccttttaaatcaaaatgccaaatttattaaggtggtggagccactgcagtgttatcttaaaataagaatattttgttgagatattccagaatttgtttatatggctggtaacatgtaaaatctatatcagcaaaagggtctacctttaaaataagcaataacaaagaagaaaaccaaattattgttcaaatttaggtttaaacttttgaagcaaacttttttttatccttgtgcactgcaggcctggtactcagattttgctatgaggttaatgaagtaccaagctgtgcttgaataatgatatgttttctcagattttctgttgtacagtttaatttagcagtccatatcacattgcaaaagtagcaatgacctcataaaatacctcttcaaaatgcttaaattcatttcacacattaattttatctcagtcttgaagccaattcagtaggtgcattggaatcaagcctggctacctgcatgctgttccttttcttttcttcttttagccattttgctaagagacacagtcttctcatcacttcgtttctcctattttgttttactagttttaagatcagagttcactttctttggactctgcctatattttcttacctgaacttttgcaagttttcaggtaaacctcagctcaggactgctatttagctcctcttaagaagattaaaagagaaaaaaaaaggcccttttaaaaatagtatacacttattttaagtgaaaagcagagaattttatttatagctaattttagctatctgtaaccaagatggatgcaaagaggctagtgcctcagagagaactgtacggggtttgtgactggaaaaagttacgttcccattctaattaatgccctttcttatttaaaaacaaaaccaaatgatatctaagtagttctcagcaataataataatgacgataatacttcttttccacatctcattgtcactgacatttaatggtactgtatattacttaatttattgaagattattatttatgtcttattaggacactatggttataaactgtgtttaagcctacaatcattgatttttttttgttatgtcacaatcagtatatcttctttggggttacctctctgaatattatgtaaacaatccaaagaaatgattgtattaagatttgtgaataaatttttagaaatctgattggcatattgagatatttaaggttgaatgtttgtccttaggataggcctatgtgctagcccacaaagaatattgtctcattagcctgaatgtgccataagactgaccttttaaaatgttttgagggatctgtggatgcttcgttaatttgttcagccacaatttattgagaaaatattctgtgtcaagcactgtgggttttaatatttttaaatcaaacgctgattacagataatagtatttatataaataattgaaaaaaattttcttttgggaagagggagaaaatgaaataaatatcattaaagataactcaggagaatcttctttacaattttacgtttagaatgtttaaggttaagaaagaaatagtcaatatgcttgtataaaacactgttcactgttttttttaaaaaaaaaacttgatttgttattaacattgatctgctgacaaaacctgggaatttgggttgtgtatgcgaatgtttcagtgcctcagacaaatgtgtatttaacttatgtaaaagataagtctggaaataaatgtctgtttatttttgtactatttaaaaattgacagatcttttctgaagaaaaaaaaaaaaaaa

SEQ ID NO: 100 - RNA, 782 nt, Homo sapiens
  source 1..782: mol_type = mRNA
gtccaggttccgccccggagccgacttcctcctggtcggcggctgcagcggggtgagcggcggcagcggccggggatcctggagccatggggcgcgcgcgcgacgccatcctggatgcgctggagaacctgaccgccgaggagctcaagaagttcaagctgaagctgctgtcggtgccgctgcgcgagggctacgggcgcatcccgcggggcgcgctgctgtccatggacgccttggacctcaccgacaagctggtcagcttctacctggagacctacggcgccgagctcaccgctaacgtgctgcgcgacatgggcctgcaggagatggccgggcagctgcaggcggccacgcaccagggctctggagccgcgccagctgggatccaggcccctcctcagtcggcagccaagccaggcctgcactttatagaccagcaccgggctgcgcttatcgcgagggtcacaaacgttgagtggctgctggatgctctgtacgggaaggtcctgacggatgagcagtaccaggcagtgcgggccgagcccaccaacccaagcaagatgcggaagctcttcagtttcacaccagcctggaactggacctgcaaggacttgctcctccaggccctaagggagtcccagtcctacctggtggaggacctggagcggagctgaggctccttcccagcaacactccggtcagcccctggcaatcccaccaaatcatcctgaatctgatctttttatacacaatatacgaaaagccagcttgaaaaaaaaaaa

SEQ ID NO: 101 - RNA, 2398 nt, Homo sapiens
  source 1..2398: mol_type = mRNA
gggaggccggatgtgagtggagcggccatttcctgtttctctgcagttttcctcagctttgggtggtggccgctgccgggcatcggcttccagtccgcggagggcgaggcggcgtggacagcggccccggcacccagcgccccgccgcccgcaagccgcgcgcccgtccgccgcgccccgagcccgccgcttcctatctcagcgccctgccgccgccgccgcggcccagcgagcggccctgatgcaggccatcaagtgtgtggtggtgggagacggagctgtaggtaaaacttgcctactgatcagttacacaaccaatgcatttcctggagaatatatccctactgtctttgacaattattctgccaatgttatggtagatggaaaaccggtgaatctgggcttatgggatacagctggacaagaagattatgacagattacgccccctatcctatccgcaaacagttggagaaacgtacggtaaggatataacctcccggggcaaagacaagccgattgccgatgtgttcttaatttgcttttcccttgtgagtcctgcatcatttgaaaatgtccgtgcaaagtggtatcctgaggtgcggcaccactgtcccaacactcccatcatcctagtgggaactaaacttgatcttagggatgataaagacacgatcgagaaactgaaggagaagaagctgactcccatcacctatccgcagggtctagccatggctaaggagattggtgctgtaaaatacctggagtgctcggcgctcacacagcgaggcctcaagacagtgtttgacgaagcgatccgagcagtcctctgcccgcctcccgtgaagaagaggaagagaaaatgcctgctgttgtaaatgtctcagcccctcgttcttggtcctgtcccttggaacctttgtacgctttgctcaaaaaaaaacaaaaaaaaaaaacaaaaaaaaaaaacaacggtggagccttcgcactcaatgccaactttttgttacagattaatttttccataaaaccattttttgaaccaatcagtaattttaaggttttgtttgttctaaatgtaagagttcagactcacattctattaaaatttagccctaaaatgacaagccttcttaaagccttatttttcaaaagcgccccccccattcttgttcagattaagagttgccaaaataccttctgaactacactgcattgttgtgccgagaacaccgagcactgaactttgcaaagaccttcgtctttgagaagacggtagcttctgcagttaggaggtgcagacacttgctctcctatgtagttctcagatgcgtaaagcagaacagcctcccgaatgaagcgttgccattgaactcaccagtgagttagcagcacgtgttcccgacataacattgtactgtaatggagtgagcgtagcagctcagctctttggatcagtctttgtgatttcatagcgagttttctgaccagcttttgcggagattttgaacagaactgctatttcctctaatgaagaattctgtttagctgtgggtgtgccgggtggggtgtgtgtgatcaaaggacaaagacagtattttgacaaaatacgaagtggagatttacactacattgtacaaggaatgaaagtgtcacgggtaaaaactctaaaaggttaatttctgtcaaatgcagtagatgatgaaagaaaggttggtattatcaggaaatgttttcttaagcttttcctttctcttacacctgccatgcctccccaaattgggcatttaattcatctttaaactggttgttctgttagtcgctaacttagtaagtgcttttcttatagaaccccttctgactgagcaatatgcctccttgtattataaaatctttctgataatgcattagaaggtttttttgtcgattagtaaaagtgctttccatgttactttattcagagctaataagtgctttccttagttttctagtaactaggtgtaaaaatcatgtgttgcagctttatagtttttaaaatattttagataattcttaaactatgaaccttcttaacatcactgtcttgccagattaccgacactgtcacttgaccaatactgaccctctttacctcgcccacgcggacacacgcctcctgtagtcgctttgcctattgatgttcctttgggtctgtgaggttctgtaaactgtgctagtgctgacgatgttctgtacaacttaactcactggcgagaatacagcgtgggacccttcagccactacaacagaattttttaaattgacagttgcagaattgtggagtgtttttacattgatcttttgctaatgcaattagcattatgttttgcatgtatgacttaataaatccttgaatcata

SEQ ID NO: 102 - RNA, 1979 nt, Homo sapiens
  source 1..1979: mol_type = mRNA
tctcctcagctccttcccgccgcccagtctggatcctgggggaggcgctgaagtcggggcccgccctgtggccccgcccggcccgcgcttgctagcgcccaaagccagcgaagcacgggcccaaccgggccatgtcgggggagcctgagctcattgagctgcgggagctggcacccgctgggcgcgctgggaagggccgcacccggctggagcgtgccaacgcgctgcgcatcgcgcggggcaccgcgtgcaaccccacacggcagctggtccctggccgtggccaccgcttccagcccgcggggcccgccacgcacacgtggtgcgacctctgtggcgacttcatctggggcgtcgtgcgcaaaggcctgcagtgcgcgcgcctctctgcagattgcaagttcacctgccactaccgctgccgcgcgctcgtctgcctggactgttgcgggccccgggacctgggctgggaacccgcggtggagcgggacacgaacgtggacgagcctgtggagtgggagacacctgacctttctcaagctgagattgagcagaagatcaaggagtacaatgcccagatcaacagcaacctcttcatgagcttgaacaaggacggttcttacacaggcttcatcaaggttcagctgaagctggtgcgccctgtctctgtgccctccagcaagaagccaccctccttgcaggatgcccggcggggcccaggacggggcacaagtgtcaggcgccgcacttccttttacctgcccaaggatgctgtcaagcacctgcatgtgctgtcacgcacaagggcacgtgaagtcattgaggccctgctgcgaaagttcttggtggtggatgacccccgcaagtttgcactctttgagcgcgctgagcgtcacggccaagtgtacttgcggaagctgttggatgatgagcagcccctgcggctgcggctcctggcagggcccagtgacaaggccctgagctttgtcctgaaggaaaatgactctggggaggtgaactgggacgccttcagcatgcctgaactacataacttcctacgtatcctgcagcgggaggaggaggagcacctccgccagatcctgcagaagtactcctattgccgccagaagatccaagaggccctgcacgcctgcccccttgggtgacctcttgtacccccaggtggaaggcagacagcaggcagcgccaagtgcgtgccgtgtgagtgtgacagggccagtggggcctgtggaatgagtgtgcatggaggccctcctgtgctgggggaatgagcccagagaacagcgaagtagcttgctccctgtgtccacctgtgggtgtagccaggtatggctctgcacccctctgccctcattactgggccttagtgggccagggctgccctgagaagctgctccaggcctgcagcaggagtggtgcagacagaagtctcctcaatttttgtctcagaagtgaaaatcttggagaccctgcaaacagaacagggtcatgtttgcaggggtgacggccctcatctatgaggaaaggttttggatcttgaatgtggtctcaggatatccttatcagagctaagggtgggtgctcagaataaggcaggcattgaggaagagtcttggtttctctctacagtgccaactcctcacacaccctgaggtcagggagtgctggctcacagtacagcatgtgccttaatgcttcatatgaggaggatgtccctgggccagggtctgtgtgaatgtgggcactggcccaggttcataccttatttgctaatcaaagccagggtctctccctcaggtgttttttatgaagtgcgtgaatgtatgtaatgtgtggtggcctcagctgaatgcctcctgtggggaaaggggttggggtgacagtcatcatcagggcctggggcctgagagaattggctcaataaagatttcaagatcctcaaaaaaaaaaaaaaaaaa

SEQ ID NO: 103 - RNA, 11571 nt, Homo sapiens
  source 1..11571: mol_type = mRNA
ctcggcgggggcccgctcccaggcccgctcccgagcccgttccgctcccgtccgccttcttctcgccttctctccgcgtggctcctccgtcccggcgtctccaaaactgaatgagcgagcggcgcgtagggcgcgcggcggcggcggcggcggcggcggcatggagcgcagtggctgggcccggcagactttcctcctagcgctgttgctgggggcgacgctgagggcgcgcgcggcggctggctattacccccgcttttcgcccttctttttcctgtgcacccaccacggggagctggaaggggatggggagcagggcgaggtgctcatttccctgcatattgcgggcaaccccacctactacgttccgggacaagaataccatgtgacaatttcaacaagcaccttttttgacggcttgctggtgacaggactatacacatctacaagtgttcaggcatcacagagcattggaggttccagtgctttcggatttgggatcatgtctgaccaccagtttggtaaccagtttatgtgcagtgtggtagcctctcacgtgagtcacctgcccacaaccaacctcagtttcatctggattgctccacctgcgggcacaggctgtgtgaatttcatggctacagcaacacaccggggccaggttattttcaaagatgctttagcccagcagttgtgtgaacaaggagctccaacagatgtcactgtgcacccacatctagctgaaatacatagtgacagcattatcctgagagatgactttgactcctaccaccaactgcaattaaatccaaatatatgggttgaatgtaacaactgtgagactggagaacagtgtggcgcgattatgcatggcaatgccgtcaccttctgtgaaccatatggcccacgagaactgattaccacaggccttaatacaacaacagcttctgtcctccaattttccattgggtcaggttcatgtcgctttagttattcagaccccagcatcatcgtgttatatgccaagaataactctgcggactggattcagctagagaaaattagagccccttccaatgtcagcacaatcatccatatcctctaccttcctgaggacgccaaaggggagaatgtccaatttcagtggaagcaggaaaatcttcgtgtaggtgaagtgtatgaagcctgctgggccttagataacatcttgatcatcaattcagctcacagacaagtcgttttagaagatagtctcgacccagtggacacaggcaactggcttttcttcccaggagctacagttaagcatagctgtcagtcagatgggaactccatttatttccatggaaatgaaggcagcgagttcaattttgccaccaccagggatgtagatctttccacagaagatattcaagagcaatggtcagaagaatttgagagccagcctacaggatgggatgtcttgggagctgtcattggtacagaatgtggaacgatagaatcaggcttatcaatggtcttcctcaaagatggagagaggaaattatgcactccatccatggacactaccggttatgggaacctgaggttttactttgtgatgggaggaatttgtgaccctggaaattctcatgaaaatgacataatcctgtatgcaaaaattgaaggaagaaaagagcatataacactggataccctttcctattcctcatataaggttccgtctttggtttctgtggtcatcaatcctgaacttcagactcctgctaccaaattttgtctcaggcaaaagaaccatcaaggacataataggaatgtctgggctgtagactttttccatgtcttgcctgttctcccttctacaatgtctcacatgatacagttttccatcaatctgggatgtggaacgcatcagcctggtaacagtgtcagcttggaattttctaccaaccatgggcgctcctggtccctccttcacactgaatgcttacctgagatctgtgctggaccccacctcccccacagcactgtctactcctctgaaaactacagtgggtggaaccgaataacaattccccttcctaacgcagcactaacccggaacaccaggattcgctggagacaaacaggaccaatccttggaaacatgtgggcaattgataatgtttatattggcccgtcatgtctcaaattctgttctggcagaggacagtgcactagacatggttgcaagtgtgaccctggattttctggcccagcttgtgagatggcatcccagacattcccaatgtttatttctgaaagctttggcagttccaggctctcctcttaccataacttttactctatccgtggtgctgaagtcagctttggttgtggtgtcttggccagtggtaaggccctggttttcaacaaagatgggcggcgtcagctaattacatctttccttgacagctcacaatccaggtttctccagttcacactgagactggggagcaaatctgttctgagcacgtgcagagcccctgatcagcctggtgaaggagttttgttgcattattcttatgataatgggataacttggaaactcctggagcattattcatatctcagctatcatgagcccagaataatctccgtagaactaccaggtgatgcaaagcagtttggaattcagttcagatggtggcaaccgtatcattcttcccagagagaagatgtatgggctattgatgagattatcatgacatctgtgcttttcaacagcattagtcttgactttaccaatcttgtggaggtcactcagtctctgggattctaccttggaaatgttcagccatactgtggccacgactggaccctttgttttacaggagattctaaacttgcctcaagtatgcgctatgtggaaacacaatcaatgcagataggagcatcctatatgattcagttcagtttggtgatgggatgtggccagaaatacaccccacacatggacaaccaggtgaagctggagtactcaaccaaccacggccttacctggcacctcgtccaagaagaatgccttccaagtatgccaagttgtcaggaatttacatcagcaagtatttaccatgccagtgagtttacacagtggaggagagtcatagtgcttcttccccagaaaacttggtccagtgctacccgtttccgctggagccagagctattacacagctcaagacgagtgggctttggacagcatttacattgggcagcagtgccccaacatgtgcagtgggcatggctcatgcgatcatggcatatgcaggtgtgaccaggggtaccaaggcactgaatgccacccagaagctgcccttccgtccacaattatgtcagattttgagaaccagaatggctgggagtctgactggcaagaagttattgggggagaaattgtaaaaccagaacaagggtgtggtgtcatctcttctggatcatctctgtacttcagcaaggctgggaaaagacagctggtgagttgggacctggatacttcttgggtggactttgtccagttctacatccagataggcggagagagtgcttcatgcaacaagcctgacagcagagaggagggcgtcctccttcagtacagcaacaatgggggcatccagtggcacctgctagcagagatgtacttttcagacttcagcaaacccagatttgtctatctggagcttccagctgctgccaagaccccttgcaccaggttccgctggtggcagcccgtgttctcaggggaggactatgaccagtgggcagtcgatgacatcatcattctgtccgagaagcagaagcagatcatcccagttatcaatccaactttacctcagaacttttatgagaagccagcttttgattaccctatgaatcagatgagtgtgtggttgatgttggctaatgaaggaatggttaaaaatgaaaccttctgtgctgccacaccatcagcaatgatatttggaaaatcagatggagatcgatttgcagtaactcgagatttgaccctgaaacctggatatgtgctacagttcaagctaaacataggttgtgccaatcaattcagcagtactgctccagttcttcttcagtactctcatgatgctggtatgtcctggtttctggtgaaagaaggctgttacccggcttctgcaggcaaaggatgcgaaggaaactccagagaactaagtgagcccaccatgtatcacacaggggactttgaagaatggacaagaatcaccattgttattccaaggtctcttgcatccagcaagaccagattccgatggatccaggagagcagctcacagaaaaacgtgcctccatttggtttagatggagtgtacatatccgagccttgtcccagttactgcagtggccatggggactgcatttcaggagtgtgtttctgtgacctgggatatactgctgcacaaggaacctgtgtgtcaaatgtccccaatcacaatgagatgttcgataggtttgaggggaagctcagccctctgtggtacaagataacaggtgcccaggttggaactggctgtggaacacttaacgatggcaaatctctctacttcaatggccctgggaaaagggaagcccggacggtccctctggacaccaggaatatcagacttgttcaattttatatacaaattggaagcaaaacttcaggcattacctgcatcaaaccaagaactagaaatgaagggcttattgttcagtattcaaatgacaatgggatactctggcatttgcttcgagagttggacttcatgtccttcctggaaccacagatcatttccattgacctgccacaggacgcgaagacacctgcaacggcatttcgatggtggcaaccgcaacatgggaagcattcagcccagtgggctttggatgatgttcttataggaatgaatgacagctctcaaactggatttcaagacaaatttgatggctctatagatttgcaagccaactggtatcgaatccaaggaggtcaagttgatattgactgtctctctatggatactgctctgatattcactgaaaacataggaaaacctcgttatgctgagacctgggattttcatgtgtcagcatctacctttttgcagtttgaaatgagcatgggctgtagcaagcccttcagcaactcccacagtgtacagctccagtattctctgaacaatggcaaggactggcatcttgtcaccgaagagtgtgttcctccaaccattggctgtctgcattacacggaaagttcaatttacacctcggaaagattccagaattggaagcggatcactgtctaccttccactctccaccatttctcccaggacccggttcagatggattcaggccaactacactgtgggggctgattcctgggcgattgataatgttgtactggcctcagggtgcccttggatgtgctcaggacgagggatttgtgatgctggacgctgtgtgtgtgaccggggctttggtggaccctattgtgttcctgttgttcctctgccctcgattcttaaagacgatttcaatgggaatttacatcctgacctttggcctgaagtgtatggtgcagagagggggaatctgaatggtgaaaccatcaaatctggaacatctctaatttttaaaggggaaggactaaggatgcttatttcaagagatctagattgtacaaatacaatgtatgtccagttttcacttagatttatagcaaaaagtaccccagagagatctcactctattctgttacaattctccatcagtggaggaatcacttggcacctgatggatgaattttactttcctcaaacaacgaatatacttttcatcaatgttcccttgccatacactgcccaaaccaatgctacaagattcagactctggcaaccttataataacggtaagaaagaagaaatctggattgttgatgacttcattatcgatggaaataatgtaaacaaccctgtgatgctcttggatacatttgattttgggcccagagaagacaattggtttttctatcctggtggtaacatcggtctttattgtccatattcttcaaagggggcacctgaagaagattcagctatggtgtttgtttcaaatgaagttggtgagcattccattaccacccgtgacctaaatgtgaatgagaacaccatcatacaatttgagatcaacgttggctgttcgactgatagctcatccgcggatccagtgagactggaattttcaagggacttcggggcgacctggcaccttctgctgcccctctgctaccacagcagcagccacgtcagctctttatgctccaccgagcaccaccccagcagcacctactacgcaggaaccatgcagggctggaggagggaggtcgtgcactttgggaagctgcacctttgtggatctgtccgtttcagatggtaccagggattttaccctgccggctctcagccagtgacatgggccattgataatgtctacatcggtccccagtgtgaggagatgtgtaatggacaggggagctgtatcaatggaaccaaatgtatatgtgaccctggctactcaggtccaacctgtaaaataagcaccaaaaatcctgattttctcaaagatgatttcgaaggtcagctagaatctgatagattcttattaatgagtggtgggaaaccatctcgaaagtgtggaatcctttctagtggaaacaacctctttttcaatgaagatggcttgcgcatgttgatgacacgagacctggatttatcacatgctagatttgtgcagttcttcatgagactgggatgtggtaaaggcgttcctgaccccaggagtcaacccgtgctcctacagtattctctcaacggtggcctctcgtggagtcttcttcaggagttccttttcagcaattccagcaatgtgggcaggtacattgccctggagatacccttgaaagcccgttctggttctactcgccttcgctggtggcaaccgtctgagaatgggcacttctacagcccctgggttatcgatcagattcttattggaggaaatatttctggtaatacggtcttggaagatgatttcacaacccttgatagtaggaaatggctgcttcacccaggaggcaccaagatgcccgtgtgtggctctactggtgatgccctggtcttcattgaaaaggccagcacccgttacgtggtcagcacagacgttgccgtgaatgaggattccttcctacagatagacttcgctgcctcctgctcagtcacagactcttgttatgcgattgaattggaatactcagtagatcttggattgtcatggcacccattggtaagggactgtctgcctaccaatgtggaatgcagtcgctatcatctgcaacggatcctggtgtcagacactttcaacaagtggactagaatcactctgcctctccctccttataccaggtcccaagccactcgtttccgttggcatcaaccagctccttttgacaagcagcagacatgggcaatagataatgtctatatcggggatggctgcatagacatgtgcagtggccatgggagatgcatccagggaaactgcgtctgtgatgaacagtggggtggcctgtactgtgatgaccccgagacctctcttccaacccaactcaaagacaacttcaatcgagctccatccagtcagaactggctgactgtgaacggagggaaattgagtacagtgtgtggagccgtggcgtcgggaatggctctccatttcagtgggggttgtagtcgattattagtcactgtggatctaaacctcactaatgctgagttcatccaattttacttcatgtatgggtgcctgattacaccaaacaaccgtaaccaaggtgttctcttggaatattctgtcaatggaggcattacctggaacctgctcatggagattttctatgaccagtacagtaagcccggatttgtgaatatccttctccctcctgatgctaaagagattgccactcgcttccgctggtggcagccaagacatgacggcctggatcagaacgactgggccattgacaatgtcctcatctcaggctctgctgaccaaaggaccgttatgctggacaccttcagcagcgccccagtaccccagcatgagcgctcccctgcagatgccggccctgtcgggaggatcgcctttgacatgtttatggaagacaaaacttcagtgaatgagcactggctattccatgatgattgtacagtagaaagattctgtgactcccctgatggtgtgatgctctgtggcagtcatgatggacgggaggtgtatgcagtgacccatgacctgactcccactgaaggctggattatgcaattcaagatctcagttggatgtaaggtgtctgaaaaaattgcccagaatcaaattcatgtgcagtattctactgacttcggtgtgagttggaattatctggtccctcagtgcttgcctgctgacccaaaatgctctggaagtgtttctcagccatctgtattctttccaactaaagggtggaaaaggatcacctacccacttcctgaaagcttagtgggaaatccggtaaggtttaggttctatcagaagtactcagacatgcagtgggcaatcgataatttctacctgggccctggatgcttggacaactgcaggggccatggagattgcttaagggaacagtgcatctgtgatccgggatactcagggccaaactgctacttgacccacactctgaagactttcctgaaggaacgctttgacagtgaagaaatcaaacctgacttatggatgtccttagaaggtggaagtacttgcactgagtgtggaattcttgccgaggacactgcactctattttgggggatccactgtgagacaagcggttacacaagatttggatcttcgaggtgcaaagttcctgcaatactgggggcgcatcggtagtgagaacaacatgacctcttgccatcgtcccatctgccggaaggaaggcgtgctgttggactactctaccgatggaggaattacctggactttgctccatgagatggattaccagaaatacatttctgttagacacgactacatacttcttcctgaagatgccctcaccaacacaactcgacttcgctggtggcagccttttgtgatcagcaatggaattgtggtctctggggtggagcgtgctcagtgggcactggacaacattttgattggtggagcagaaatcaatcccagccaattggtggacacttttgatgatgaaggcacttcccatgaagaaaactggagtttttaccctaatgctgtaaggacagcaggattttgtggcaatccatcctttcacctctattggccaaataaaaagaaggacaagactcacaatgctctctcctcccgagaactcattatacagccaggatacatgatgcagtttaaaattgtggtgggttgtgaagccacttcttgtggtgaccttcattccgtaatgctggaatacactaaggatgcaagatcggattcctggcagctcgtacagacccagtgccttccttcctcttctaacagcattggctgctcccctttccagttccatgaagccaccatctacaactctgtcaacagctcaagctggaaaagaatcaccatccagctgcctgaccatgtctcctctagtgcaacacagttccgctggatccagaagggagaagaaactgagaagcaaagctgggcaattgaccacgtgtacattggagaggcttgccccaagctctgcagcgggcacggatactgcacgaccggtgccatctgcatctgcgacgagagcttccaaggtgatgactgctctgttttcagtcacgaccttcccagttatattaaagataattttgagtccgcaagagtcaccgaggcaaactgggagaccattcaaggtggagtcataggaagtggctgtgggcagctggccccctacgcccatggagactcactgtactttaatggctgtcagatcaggcaagcagctaccaagcctctggatctcactcgagcaagcaaaatcatgtttgttttgcaaattgggagcatgtcgcagacggacagctgcaacagtgacctgagtggcccccacgctgtggacaaggcagtgctgctgcaatacagcgtcaacaacgggatcacctggcatgtcatcgcccagcaccagccaaaggacttcacacaagctcagagagtgtcttacaatgtccccctggaggcacggatgaaaggagtcttactgcgctggtggcaaccacgccacaatggaacaggtcatgatcaatgggctttggaccatgtggaggtcgtcctagtaagcactcgcaaacaaaattacatgatgaatttttcacgacaacatgggctcagacatttctacaacagaagacgaaggtcacttaggcgatacccatgaagaatcaaaaagtttattttttttcttccaacatgtgatgtgttgctctccattcttttaaatctcgcactacatctgatatcaggaaatatctgtgaaggacttggtgattacctgaaagcccttctcaagaccgagtgtacaccactttcccacactgtgaactaatgacaagtgacttatttgctcataagtaaatgtcttcatgttgatgtgtccgtgaaagttgtgatctgttgtaatatcagttacagtggcagtattgacaataagaaacagtttaacagaaaaatgaaatttaagcacaaaaaatttaagagattttatgtttaaaatggcatttagcacagtatttaacattcttggtcacaaagctatttaagtggactgtatttcggctatgtctcatgttttatatgattaaattatcattgtttgtcctttatgtattctcttctacaatacaacacattgaaactgtatttacttgttatgttgtaatattttgctgctgaatttggggctacttatattctgcagaaaattaattgaaatacctattcaagaagatagttgtaaagatattgtatctcctttaatatactccttaaaaatgtatgttggtttagcgttgttttgtggataagaaaaatgcttgaccctgaaatattttctactttaaattgtggatgaagaccctatctcccacaaataagttcccatttccttgtctaaagatctttttttaagtgttctgtggctgatttactaacagtaactgccattttttgtctgtgataacagagtgatttgtaaaacagtggttgttttttcattgtgttttcttcgtggattgttttttctgcgggtcatattcataccttctgatgaagttgtacaacaccagcaacattataatggccctgtagctctgaatgctatttgtgtaactgaaaggttgcactctagggtgaaccaagctataaaagcccatgcttaaataaaaattatgtccaaaagccattgaa

SEQ ID NO: 104 - RNA, 1926 nt, Homo sapiens
  source 1..1926: mol_type = mRNA
gtggatgagctgtgagtgcgcgcgcgtgcgcggggccgcgacctgtgccggctcgagcccgctgggcactcggaggcgcgcacgtcgttccccgccctcccgccgccgcccgccctcgctctctcgcgctaccctcccgccgcccgcggtcctccgtcggttctctcgttagtccacggtctggtcttcagctacccgccttcgtctccgagtttgcgactcgcggaccggcgtccccggcgcgaagaggctggactcggattcgttgcctgagcaatggctgccatccggaagaaactggtgattgttggtgatggagcctgtggaaagacatgcttgctcatagtcttcagcaaggaccagttcccagaggtgtatgtgcccacagtgtttgagaactatgtggcagatatcgaggtggatggaaagcaggtagagttggctttgtgggacacagctgggcaggaagattatgatcgcctgaggcccctctcctacccagataccgatgttatactgatgtgtttttccatcgacagccctgatagtttagaaaacatcccagaaaagtggaccccagaagtcaagcatttctgtcccaacgtgcccatcatcctggttgggaataagaaggatcttcggaatgatgagcacacaaggcgggagctagccaagatgaagcaggagccggtgaaacctgaagaaggcagagatatggcaaacaggattggcgcttttgggtacatggagtgttcagcaaagaccaaagatggagtgagagaggtttttgaaatggctacgagagctgctctgcaagctagacgtgggaagaaaaaatctgggtgccttgtcttgtgaaaccttgctgcaagcacagcccttatgcggttaattttgaagtgctgtttattaatcttagtgtatgattactggcctttttcatttatctataatttacctaagattacaaatcagaagtcatcttgctaccagtatttagaagccaactatgattattaacgatgtccaacccgtctggcccaccagggtccttttgacactgctctaacagccctcctctgcactcccacctgacacaccaggcgctaattcaaggaatttcttaacttcttgcttctttctagaaagagaaacagttggtaacttttgtgaattaggctgtaactactttataactaacatgtcctgcctattatctgtcagctgcaaggtactctggtgagtcaccacttcagggctttactccgtaacagattttgttggcatagctctggggtgggcagttttttgaaaatgggctcaaccagaaaagcccaagttcatgcagctgtggcagagttacagttctgtggtttcatgttagttaccttatagttactgtgtaattagtgccacttaatgtatgttaccaaaaataaatatatctaccccagactagatgtagtattttttgtataattggatttcctaatactgtcatcctcaaagaaagtgtattggttttttaaaaaagaaagtgtatttggaaataaagtcagatggaaaattcattttttaaattcccgttttgtcactttttctgataaaagatggccatattaccccttttcggccccatgtatctcagtaccccatggagctgggctaagtaaataggaattggtttcacgcctgaggcaattagacactttggaagatggcataacctgtctcacctggacttaagcatctggctctaattcacagtgctcttttctcctcactgtatccaggttccctcccagaggagccaccagttctcatgggtggcactcagtctctcttctctccagctgactaaactttttttctgtaccagttaatttttccaactactaatagaataaaggcagttttctaaaaaaa

SEQ ID NO: 105 - RNA, 2005 nt, Homo sapiens
  source 1..2005: mol_type = mRNA
caacggctcattctgctcccccgggtcggagccccccggagctgcgcgcgggcttgcagcgcctcgcccgcgctgtcctcccggtgtcccgcttctccgcgccccagccgccggctgccagcttttcggggccccgagtcgcacccagcgaagagagcgggcccgggacaagctcgaactccggccgcctcgcccttccccggctccgctccctctgccccctcggggtcgcgcgcccacgatgctgcagggccctggctcgctgctgctgctcttcctcgcctcgcactgctgcctgggctcggcgcgcgggctcttcctctttggccagcccgacttctcctacaagcgcagcaattgcaagcccatccctgccaacctgcagctgtgccacggcatcgaataccagaacatgcggctgcccaacctgctgggccacgagaccatgaaggaggtgctggagcaggccggcgcttggatcccgctggtcatgaagcagtgccacccggacaccaagaagttcctgtgctcgctcttcgcccccgtctgcctcgatgacctagacgagaccatccagccatgccactcgctctgcgtgcaggtgaaggaccgctgcgccccggtcatgtccgccttcggcttcccctggcccgacatgcttgagtgcgaccgtttcccccaggacaacgacctttgcatccccctcgctagcagcgaccacctcctgccagccaccgaggaagctccaaaggtatgtgaagcctgcaaaaataaaaatgatgatgacaacgacataatggaaacgctttgtaaaaatgattttgcactgaaaataaaagtgaaggagataacctacatcaaccgagataccaaaatcatcctggagaccaagagcaagaccatttacaagctgaacggtgtgtccgaaagggacctgaagaaatcggtgctgtggctcaaagacagcttgcagtgcacctgtgaggagatgaacgacatcaacgcgccctatctggtcatgggacagaaacagggtggggagctggtgatcacctcggtgaagcggtggcagaaggggcagagagagttcaagcgcatctcccgcagcatccgcaagctgcagtgctagtcccggcatcctgatggctccgacaggcctgctccagagcacggctgaccatttctgctccgggatctcagctcccgttccccaagcacactcctagctgctccagtctcagcctgggcagcttccccctgccttttgcacgtttgcatccccagcatttcctgagttataaggccacaggagtggatagctgttttcacctaaaggaaaagcccacccgaatcttgtagaaatattcaaactaataaaatcatgaatatttttatgaagtttaaaaatagctcactttaaagctagttttgaataggtgcaactgtgacttgggtctggttggttgttgtttgttgttttgagtcagctgattttcacttcccactgaggttgtcataacatgcaaattgcttcaattttctctgtggcccaaacttgtgggtcacaaaccctgttgagataaagctggctgttatctcaacatcttcatcagctccagactgagactcagtgtctaagtcttacaacaattcatcattttataccttcaatgggaacttaaactgttacatgtatcacattccagctacaatacttccatttattagaagcacattaaccatttctatagcatgatttcttcaagtaaaaggcaaaagatataaattttataattgacttgagtactttaagccttgtttaaaacatttcttacttaacttttgcaaattaaacccattgtagcttacctgtaatatacatagtagtttacctttaaaagttgtaaaaatattgctttaaccaacactgtaaatatttcagataaacattatattcttgtatataaactttacatcctgttttacctataaaaaaaaaaaaaaa

SEQ ID NO: 106 - RNA, 3088 nt, Homo sapiens
  source 1..3088: mol_type = mRNA
cggagagccgcgcagggcgcgggccgcgcggggtggggcagccggagcgcaggcccccgatccccggcgggcgcccccgggcccccgcgcgcgccccggcctccgggagactggcgcatgccacggagcgcccctcgggccgccgccgctcctgcccgggcccctgctgctgctgctgtcgcctgcgcctgctgccccaactcggcgcccgacttcttcatggtgtgcggaggtcatgttcgctccttagcaggcaaacgacttttctcctcgcctcctcgccccgcatgttcaggaccaaacgatctgcgctcgtccggcgtctctggaggagccgtgcgcccggcggcgaggacgaggaggagggcgcagggggaggtggaggaggaggcgagctgcggggagaaggggcgacggacagccgagcgcatggggccggtggcggcggcccgggcagggctggatgctgcctgggcaaggcggtgcgaggtgccaaaggtcaccaccatccccacccgccagccgcgggcgccggcgcggccgggggcgccgaggcggatctgaaggcgctcacgcactcggtgctcaagaaactgaaggagcggcagctggagctgctgctccaggccgtggagtcccgcggcgggacgcgcaccgcgtgcctcctgctgcccggccgcctggactgcaggctgggcccgggggcgcccgccggcgcgcagcctgcgcagccgccctcgtcctactcgctccccctcctgctgtgcaaagtgttcaggtggccggatctcaggcattcctcggaagtcaagaggctgtgttgctgtgaatcttacgggaagatcaaccccgagctggtgtgctgcaacccccatcaccttagccgactctgcgaactagagtctcccccccctccttactccagatacccgatggattttctcaaaccaactgcagactgtccagatgctgtgccttcctccgctgaaacagggggaacgaattatctggcccctggggggctttcagattcccaacttcttctggagcctggggatcggtcacactggtgcgtggtggcatactgggaggagaagacgagagtggggaggctctactgtgtccaggagccctctctggatatcttctatgatctacctcaggggaatggcttttgcctcggacagctcaattcggacaacaagagtcagctggtgcagaaggtgcggagcaaaatcggctgcggcatccagctgacgcgggaggtggatggtgtgtgggtgtacaaccgcagcagttaccccatcttcatcaagtccgccacactggacaacccggactccaggacgctgttggtacacaaggtgttccccggtttctccatcaaggctttcgactacgagaaggcgtacagcctgcagcggcccaatgaccacgagtttatgcagcagccgtggacgggctttaccgtgcagatcagctttgtgaagggctggggccagtgctacacccgccagttcatcagcagctgcccgtgctggctagaggtcatcttcaacagccggtagccgcgtgcggaggggacagagcgtgagctgagcaggccacacttcaaactactttgctgctaatattttcctcctgagtgcttgcttttcatgcaaactctttggtcgttttttttttgtttgttggttggttttcttcttctcgtcctcgtttgtgttctgttttgtttcgctctttgagaaatagcttatgaaaagaattgttgggggtttttttggaagaaggggcaggtatgatcggcaggacaccctgataggaagaggggaagcagaaatccaagcaccaccaaacacagtgtatgaaggggggcggtcatcatttcacttgtcaggagtgtgtgtgagtgtgagtgtgcggctgtgtgtgcacgcgtgtgcaggagcggcagatggggagacaacgtgctctttgttttgtgtctcttatggatgtccccagcagagaggtttgcagtcccaagcggtgtctctcctgccccttggacacgctcagtggggcagaggcagtacctgggcaagctggcggctggggtcccagcagctgccaggagcacggctctgtccccagcctgggaaagcccctgcccctcctctccctcatcaaggacacgggcctgtccacaggcttctgagcagcgagcctgctagtggccgaaccagaaccaattattttcatccttgtcttattcccttcctgccagcccctgccattgtagcgtctttcttttttggccatctgctcctggatctccctgagatgggcttcccaagggctgccggggcagccccctcacagtattgctcacccagtgccctctcccctcagcctctcccctgcctgccctggtgacatcaggtttttcccggacttagaaaaccagctcagcactgcctgctcccatcctgtgtgttaagctctgctattaggccagcaagcggggatgtccctgggagggacatgcttagcagtccccttccctccaagaaggatttggtccgtcataacccaaggtaccatcctaggctgacacctaactcttctttcatttcttctacaactcatacactcgtatgatacttcgacactgttcttagctcaatgagcatgtttagactttaacataagctatttttctaactacaaaggtttaaatgaacaagagaagcattctcattggaaatttagcattgtagtgctttgagagagaaaggactcctgaaaaaaaacctgagatttattaaagaaaaaaatgtattttatgttatatataaatatattattacttgtaaatataaagacgttttataagcatcattatttatgtattgtgcaatgtgtataaacaagaaaaataaagaaaagatgcactttgctttaatataaatgcaaataacaaatgccaaattaaaaaagataaacacaagattggtgtttttttctatgggtgttatcacctagctgaatgtttttctaaaggagtttatgttccattaaacgatttttaaaatgtacacttgaa

SEQ ID NO: 107 - RNA, 1216 nt, Homo sapiens
  source 1..1216: mol_type = mRNA
ggcagctgcacggctcctggccccggagcatgcgcgagagccgccccggagcgccccggagccccccgccgtcccgcccgcggcgtcccgcgccccgccgccagcgcacccccggacgctatggcccacccctccggctggccccttctgtaggatggtagcacacaaccaggtggcagccgacaatgcagtctccacagcagcagagccccgacggcggccagaaccttcctcctcttcctcctcctcgcccgcggcccccgcgcgcccgcggccgtgccccgcggtcccggccccggcccccggcgacacgcacttccgcacattccgttcgcacgccgattaccggcgcatcacgcgcgccagcgcgctcctggacgcctgcggattctactgggggcccctgagcgtgcacggggcgcacgagcggctgcgcgccgagcccgtgggcaccttcctggtgcgcgacagccgccagcggaactgctttttcgcccttagcgtgaagatggcctcgggacccacgagcatccgcgtgcactttcaggccggccgctttcacctggatggcagccgcgagagcttcgactgcctcttcgagctgctggagcactacgtggcggcgccgcgccgcatgctgggggccccgctgcgccagcgccgcgtgcggccgctgcaggagctgtgccgccagcgcatcgtggccaccgtgggccgcgagaacctggctcgcatccccctcaaccccgtcctccgcgactacctgagctccttccccttccagatttgaccggcagcgcccgccgtgcacgcagcattaactgggatgccgtgttattttgttattacttgcctggaaccatgtgggtaccctccccggcctgggttggagggagcggatgggtgtaggggcgaggcgcctcccgccctcggctggagacgaggccgcagaccccttctcacctcttgagggggtcctccccctcctggtgctccctctgggtccccctggttgttgtagcagcttaactgtatctggagccaggacctgaactcgcacctcctacctcttcatgtttacatatacccagtatctttgcacaaaccaggggttgggggagggtctctggctttatttttctgctgtgcagaatcctattttatattttttaaagtcagtttaggtaataaactttattatgaaagtttttttttt

SEQ ID NO: 108 - RNA, 4978 nt, Homo sapiens
  source 1..4978: mol_type = mRNA
ggtttccggagctgcggcggcgcagactgggagggggagccgggggttccgacgtcgcagccgagggaacaagccccaaccggatcctggacaggcaccccggcttggcgctgtctctccccctcggctcggagaggcccttcggcctgagggagcctcgccgcccgtccccggcacacgcgcagccccggcctctcggcctctgccggagaaacagttgggacccctgattttagcaggatggcccaatggaatcagctacagcagcttgacacacggtacctggagcagctccatcagctctacagtgacagcttcccaatggagctgcggcagtttctggccccttggattgagagtcaagattgggcatatgcggccagcaaagaatcacatgccactttggtgtttcataatctcctgggagagattgaccagcagtatagccgcttcctgcaagagtcgaatgttctctatcagcacaatctacgaagaatcaagcagtttcttcagagcaggtatcttgagaagccaatggagattgcccggattgtggcccggtgcctgtgggaagaatcacgccttctacagactgcagccactgcggcccagcaagggggccaggccaaccaccccacagcagccgtggtgacggagaagcagcagatgctggagcagcaccttcaggatgtccggaagagagtgcaggatctagaacagaaaatgaaagtggtagagaatctccaggatgactttgatttcaactataaaaccctcaagagtcaaggagacatgcaagatctgaatggaaacaaccagtcagtgaccaggcagaagatgcagcagctggaacagatgctcactgcgctggaccagatgcggagaagcatcgtgagtgagctggcggggcttttgtcagcgatggagtacgtgcagaaaactctcacggacgaggagctggctgactggaagaggcggcaacagattgcctgcattggaggcccgcccaacatctgcctagatcggctagaaaactggataacgtcattagcagaatctcaacttcagacccgtcaacaaattaagaaactggaggagttgcagcaaaaagtttcctacaaaggggaccccattgtacagcaccggccgatgctggaggagagaatcgtggagctgtttagaaacttaatgaaaagtgcctttgtggtggagcggcagccctgcatgcccatgcatcctgaccggcccctcgtcatcaagaccggcgtccagttcactactaaagtcaggttgctggtcaaattccctgagttgaattatcagcttaaaattaaagtgtgcattgacaaagactctggggacgttgcagctctcagaggatcccggaaatttaacattctgggcacaaacacaaaagtgatgaacatggaagaatccaacaacggcagcctctctgcagaattcaaacacttgaccctgagggagcagagatgtgggaatgggggccgagccaattgtgatgcttccctgattgtgactgaggagctgcacctgatcacctttgagaccgaggtgtatcaccaaggcctcaagattgacctagagacccactccttgccagttgtggtgatctccaacatctgtcagatgccaaatgcctgggcgtccatcctgtggtacaacatgctgaccaacaatcccaagaatgtaaacttttttaccaagcccccaattggaacctgggatcaagtggccgaggtcctgagctggcagttctcctccaccaccaagcgaggactgagcatcgagcagctgactacactggcagagaaactcttgggacctggtgtgaattattcagggtgtcagatcacatgggctaaattttgcaaagaaaacatggctggcaagggcttctccttctgggtctggctggacaatatcattgaccttgtgaaaaagtacatcctggccctttggaacgaagggtacatcatgggctttatcagtaaggagcgggagcgggccatcttgagcactaagcctccaggcaccttcctgctaagattcagtgaaagcagcaaagaaggaggcgtcactttcacttgggtggagaaggacatcagcggtaagacccagatccagtccgtggaaccatacacaaagcagcagctgaacaacatgtcatttgctgaaatcatcatgggctataagatcatggatgctaccaatatcctggtgtctccactggtctatctctatcctgacattcccaaggaggaggcattcggaaagtattgtcggccagagagccaggagcatcctgaagctgacccaggtagcgctgccccatacctgaagaccaagtttatctgtgtgacaccaacgacctgcagcaataccattgacctgccgatgtccccccgcactttagattcattgatgcagtttggaaataatggtgaaggtgctgaaccctcagcaggagggcagtttgagtccctcacctttgacatggagttgacctcggagtgcgctacctcccccatgtgaggagctgagaacggaagctgcagaaagatacgactgaggcgcctacctgcattctgccacccctcacacagccaaaccccagatcatctgaaactactaactttgtggttccagattttttttaatctcctacttctgctatctttgagcaatctgggcacttttaaaaatagagaaatgagtgaatgtgggtgatctgcttttatctaaatgcaaataaggatgtgttctctgagacccatgatcaggggatgtggcggggggtggctagagggagaaaaaggaaatgtcttgtgttgttttgttcccctgccctcctttctcagcagctttttgttattgttgttgttgttcttagacaagtgcctcctggtgcctgcggcatccttctgcctgtttctgtaagcaaatgccacaggccacctatagctacatactcctggcattgcactttttaaccttgctgacatccaaatagaagataggactatctaagccctaggtttctttttaaattaagaaataataacaattaaagggcaaaaaacactgtatcagcatagcctttctgtatttaagaaacttaagcagccgggcatggtggctcacgcctgtaatcccagcactttgggaggccgaggcggatcataaggtcaggagatcaagaccatcctggctaacacggtgaaaccccgtctctactaaaagtacaaaaaattagctgggtgtggtggtgggcgcctgtagtcccagctactcgggaggctgaggcaggagaatcgcttgaacctgagaggcggaggttgcagtgagccaaaattgcaccactgcacactgcactccatcctgggcgacagtctgagactctgtctcaaaaaaaaaaaaaaaaaaaagaaacttcagttaacagcctccttggtgctttaagcattcagcttccttcaggctggtaatttatataatccctgaaacgggcttcaggtcaaacccttaagacatctgaagctgcaacctggcctttggtgttgaaataggaaggtttaaggagaatctaagcattttagacttttttttataaatagacttattttcctttgtaatgtattggccttttagtgagtaaggctgggcagagggtgcttacaaccttgactccctttctccctggacttgatctgctgtttcagaggctaggttgtttctgtgggtgccttatcagggctgggatacttctgattctggcttccttcctgccccaccctcccgaccccagtccccctgatcctgctagaggcatgtctccttgcgtgtctaaaggtccctcatcctgtttgttttaggaatcctggtctcaggacctcatggaagaagagggggagagagttacaggttggacatgatgcacactatggggccccagcgacgtgtctggttgagctcagggaatatggttcttagccagtttcttggtgatatccagtggcacttgtaatggcgtcttcattcagttcatgcagggcaaaggcttactgataaacttgagtctgccctcgtatgagggtgtatacctggcctccctctgaggctggtgactcctccctgctggggccccacaggtgaggcagaacagctagagggcctccccgcctgcccgccttggctggctagctcgcctctcctgtgcgtatgggaacacctagcacgtgctggatgggctgcctctgactcagaggcatggccggatttggcaactcaaaaccaccttgcctcagctgatcagagtttctgtggaattctgtttgttaaatcaaattagctggtctctgaattaagggggagacgaccttctctaagatgaacagggttcgccccagtcctcctgcctggagacagttgatgtgtcatgcagagctcttacttctccagcaacactcttcagtacataataagcttaactgataaacagaatatttagaaaggtgagacttgggcttaccattgggtttaaatcatagggacctagggcgagggttcagggcttctctggagcagatattgtcaagttcatggccttaggtagcatgtatctggtcttaactctgattgtagcaaaagttctgagaggagctgagccctgttgtggcccattaaagaacagggtcctcaggccctgcccgcttcctgtccactgccccctccccatccccagcccagccgagggaatcccgtgggttgcttacctacctataaggtggtttataagctgctgtcctggccactgcattcaaattccaatgtgtacttcatagtgtaaaaatttatattattgtgaggttttttgtcttttttttttttttttttttttggtatattgctgtatctactttaacttccagaaataaacgttatataggaaccgtaaaaa

SEQ ID NO: 109 - RNA, 8332 nt, Homo sapiens
  source 1..8332: mol_type = mRNA
gtgtgtggatgtgtgagtgagagggaacgagagtaagagaaagaaagaagtgaggggatgtaaactcgaataaatttcaaagtgcctccgagggatgcaacgggcaaaaactgaactgttcaggcttcagattgtaactgacgatctgaggaaaaatgaggtgctcgatgaattttcgtttgtattttttggcgaggcgggggaggtgttgagattttttttttttcccctcggggtgggtgcgagggggatgcatcctagcctgcccgacccggagcaagtcgcgtctccccgccggagcccccccacccatttctttgctgaacttgcaattccgtgcgcctcggcgtgtttccccctccccccttccctccgtcccctcccctccccggagaagagagttggtgttaagagtcagggatcttggctgtgtgtctgcggatctgtagtggcggcggcggcggcggcggcggggaggcagcaggcgcgggagcgggcgcaggagcaggcggcggcggtggcggcggcggttagacatgaacgccgcctcggcgccggcggtgcacggagagccccttctcgcgcgcgggcggtttgtgtgattttgctaaaatgcatcaccaacagcgaatggctgccttagggacggacaaagagctgagtgatttactggatttcagtgcgatgttttcacctcctgtgagcagtgggaaaaatggaccaacttctttggcaagtggacattttactggctcaaatgtagaagacagaagtagctcagggtcctgggggaatggaggacatccaagcccgtccaggaactatggagatgggactccctatgaccacatgaccagcagggaccttgggtcacatgacaatctctctccaccttttgtcaattccagaatacaaagtaaaacagaaaggggctcatactcatcttatgggagagaatcaaacttacagggttgccaccagcagagtctccttggaggtgacatggatatgggcaacccaggaaccctttcgcccaccaaacctggttcccagtactatcagtattctagcaataatccccgaaggaggcctcttcacagtagtgccatggaggtacagacaaagaaagttcgaaaagttcctccaggtttgccatcttcagtctatgctccatcagcaagcactgccgactacaatagggactcgccaggctatccttcctccaaaccagcaaccagcactttccctagctccttcttcatgcaagatggccatcacagcagtgacccttggagctcctccagtgggatgaatcagcctggctatgcaggaatgttgggcaactcttctcatattccacagtccagcagctactgtagcctgcatccacatgaacgtttgagctatccatcacactcctcagcagacatcaattccagtcttcctccgatgtccactttccatcgtagtggtacaaaccattacagcacctcttcctgtacgcctcctgccaacgggacagacagtataatggcaaatagaggaagcggggcagccggcagctcccagactggagatgctctggggaaagcacttgcttcgatctattctccagatcacactaacaacagcttttcatcaaacccttcaactcctgttggctctcctccatctctctcagcaggcacagctgtttggtctagaaatggaggacaggcctcatcgtctcctaattatgaaggacccttacactctttgcaaagccgaattgaagatcgtttagaaagactggatgatgctattcatgttctccggaaccatgcagtgggcccatccacagctatgcctggtggtcatggggacatgcatggaatcattggaccttctcataatggagccatgggtggtctgggctcagggtatggaaccggccttctttcagccaacagacattcactcatggtggggacccatcgtgaagatggcgtggccctgagaggcagccattctcttctgccaaaccaggttccggttccacagcttcctgtccagtctgcgacttcccctgacctgaacccaccccaggacccttacagaggcatgccaccaggactacaggggcagagtgtctcctctggcagctctgagatcaaatccgatgacgagggtgatgagaacctgcaagacacgaaatcttcggaggacaagaaattagatgacgacaagaaggatatcaaatcaattactaggtcaagatctagcaataatgacgatgaggacctgacaccagagcagaaggcagagcgtgagaaggagcggaggatggccaacaatgcccgagagcgtctgcgggtccgtgacatcaacgaggctttcaaagagctcggccgcatggtgcagctccacctcaagagtgacaagccccagaccaagctcctgatcctccaccaggcggtggccgtcatcctcagtctggagcagcaagtccgagaaaggaatctgaatccgaaagctgcgtgtctgaaaagaagggaggaagagaaggtgtcctcagagcctccccctctctccttggccggcccacaccctggaatgggagacgcatcgaatcacatgggacagatgtaaaagggtccaagttgccacattgcttcattaaaacaagagaccacttccttaacagctgtattatcttaaacccacataaacacttctccttaacccccatttttgtaatataagacaagtctgagtagttatgaatcgcagacgcaagaggtttcagcattcccaattatcaaaaaacagaaaaacaaaaaaaagaaagaaaaaagtgcaacttgagggacgactttctttaacatatcattcagaatgtgcaaagcagtatgtacaggctgagacacagcccagagactgaacggcaatctttccacactgtggaacaatgcatttgtgcctaaacttcttttggaaaaaaaaaatataattaatttgtaagtctgaaaaaaaaatatttaatttaaaaaaaattgtaaacttgcaataatgaaaaagtgtacttctgaagaaaactacatgaacgtttttgttggtattcaagtcagctagtgtttataattactggatattgaattaggggaagctcggctgccctagtaacaaaaccagcaaacgtcctgatgacaacgaagtgatgacattagccattccttagggtaggaggaacagatggatcttatagacctatgacaaatatatatataaatatatatataaatatatattaaaaatttagtgactatggtaagcttttgttcatttgtttcagacttttttctcctgtaaaaaaatagtactgattaacttttttaaaagaaagattttactgtaaatatggatttttttttttttggtcttatttctgtccctttccctggtttgttatcgtaacctgtagtgccaactctgcttccagaggggtagtgcaggatgaaatgctgaccctgatgttgcttctcattcataaataagtagaaagttgtttctccagtcttttgggaacacaggacttaaaagtcacatcatgtgtagatattacaagcagcattaccaagacatggcaaaaagagtttgtctgaattgtaatgttgcgtttgtgaacctattctgggattttcagaggtacaaggttagaatgctacaatgttaccactgtgccttccaatgtttatatcatcggaaacataacataatcaaagtggctgtgatttaacaaaatgattaaagtgttacctacctgtgtagccgaagtagtgtgcagtgaggcgtttctgaatacatggtcagatttttggaaaaaaacaaaaacaaaaaaaacaagtaaagttcaaaaaccgtcaaatgagaaaattgcaagtagtgtgacagagctgattgattttgttgctttcttgattttttttttcaaaatgggtttactaaaatgtagatgacttaactgcctcctccttcgtctgaaaaatgccaatattcaatcatcatgcagcattataacaagccttataagtcctaaagcattaagttgcacttttttgaggaggggtagtgcagtatttctctggccagtatgaatgaagtttatacttaccatatttgatagaaacatagatcaagctatggcacagcgactcatcagatagctagctttgacgtctgggcacaattgaaccaacttccatcgtgaatctttataatgattgactttggtgtatagtgcagtaaacaaatagtgctcctagttaagtatttgtcagcatccttttgtctctaacttgtttctatttttacagccacacaattcttggcatgtattaagaaaaaaaaaaatccctgttcaagtagtttttccacctatcagcactgagtaaatgccataaatccattgaaatggtctaaatgttccatctgttctcctgttttgccagttatatagtaatgaaatacatttgtaaattttatgcaacaaatggcaaacgtatcattattttgaaattgtgtatgtaaaagttatatttttacatgtagactcttgttattatgtgttttaatacattgtatcagtttttgtttttttttaaaaactgtggtttaaaaagaagtctcatttaaatgaaatagctacaagaatcagaattttatgttcatttctgaaaatgtaagaacaaataagatagttaccacgtggtcatcttttacaaacccataaacattttgattagctgtgtgtgtgttgaaaaactgtaaatatgttcagtagcgataaaactaaaataactttgatttgttgataagttcctaaaatgtggaggtggattaaaaccttaggagaatagcagaaatcaaacttcatgaaaagttattttggggctttcctgtgaaatgtatgaacaaagaggctcagagaaggacatggaagacaataatgtatactctctcctcctccctgaataatgaaaaccatgtgtatttgttccctccgtatgttaaagatttccttttagtggtacattctgcactcattttgtatagtctaccaaggcgggtatccctaggaacaatattatataggaagcaggtatactctgatcacattcaggataagtgtacagaagaaaatacggtgtttactctttagggaactggaaacactccctgcattgatgtacattttaagaatggcacttttgatacatgttatcataaaggtgcttaatagagctgaattaaagtttttcaaatctgtaaacaaagcaaaaaagtaaattgtagtcatttgattattttttaaattggtgctttatattttgttctcactcagagtaaaagctgcaatttattgttcaccagctttgatgtattcattactcagtaatgcaatacctctattgttgaattccctttggaaataagtgaaaattctaacggccactgaaagctgctcgctaggttttgcttggtggagaaacataatctgcacctatccatattaattgggttgtatccccattaaaaaagaaaaaaagggaatgtggcctttttagtgtgttttttattgttgttgttttgtaattatcaaacccaggtaagatattggtatcctgcactggattttcaaatgaagttcagcagaagacagttaagattaaagtactatacaaaaatttcaaaagggtccatactacgctatctgtatgacgacacttaggctggggatctctttcagaaactcggactttaaaagcaacttggagcagttgatccacctccacattcaagtaatttatgaatatgcagaatagggatctgttcatctagaaatttttaccatttgtcttctgtgtagctgcaaggaacactaatgtttatacaactgtcagtccacccagtggtgcaactggttctgattcagtcttccgattcctttttatttttcactttttcctatttctgaatttttttttttatttgtgatcttgattttgatgaggggttggggagtggggagggagtcgaaccaagacttggagttaagaggattttcatcttttgcatccaacaggcagaatatgatctgtgtccaaaagtgaacttgagtcaggaatgaatcaatttcagcataaacaagcacaaaaatttagtctgctggctgactggaagcaaaaaagtcaagatggaatatgatgaattccaacacaatggggcaccaaggcctttaggcctctctttttattttgctttggttttgtttgtttttctttagagacatgctctttctcatgggacttgaagtggactcatctttgtgcagtgctggttttgccatactcatttcaagtattatagacatatgtaatggtgaaaatatatgaactgtggcctttttcattcttgttacttgtgatgcaattaagtgaagataagaaaaaaaaaaaaaaagcagagatttaccatgtatcagtgcctggctttttgttataaagctttgtttgtctagtgctcttttgctataaaatagactgtagtacaccctagtaggaaaaaaaaaaaactaaatttaaaaataaaaaatatatttggcttatttttcgcaggagcaatccttttataccatgaatattacaaaaaaattgtcagattctgaatatttcttctttgtagatttttggaatcattatgagtaaaagtttgttactttattttactatttaaaagatgttattttaccatgtgttaccaagatgaaactgtatgggtagcttttttgtttgttttttgttttgtttttgtttttgtttttgtttttagttgtaggtcgcagcggggaaattttttgcgactgtacacatagctgcagcattaaaaacttaaaaaaattgttaaaaaaaaaaaaagggaaaacatttcaaaaaaaaaaaaaaagataaacagttacaccttgttttcaatgtgtggctgagtgcctcgattttttcatgtttttggtgtatttctgatttgtagaagtgtccaaacaggttgtgtgctggagttccttcaagacaaaaacaaacccagcttggtcaaggccattacctgtttcccatctgtagttattcgatgaagtcatgtacatgaccgttctgtagcaataaatgtgccatttttataaactgtttctgacacttgtttcatttcattttgcattgtccatatagctatgattctcttctgtaagtaaaacgcatctatatttcattttccaagtgttggaggtattgacagcttaacaaacaaaacatacaaaaaaaatcacaaaaacaaattgaaaagcaaagcacatgattgatcaaggaagagatgcccttaatgaaaatggaacgggatgcatgcaaaacaaaaagaaaactgtctagaggattaactaattgaaggaatataattaatgtgtgtgtaacactgaagctatgcatttgaagagctctgaactgcaccagtgttttcggttgtgctgcaggttgctaagtcaagtcagccttaaccttttgcaccagttggtcggctgtttggcagaacattctcagatcttttcagtcaaaaatctaagatgatttattttgtatcactttgttaaaagctgaatattgttaactacagttaatattaacactgtatttatactttctcaaactacatccgccccaccacttctggttgcctctgttgactattaatccagatgtaaacaaccagatgtttttttctaacttgtacaaactgacgtgtgtcaactatcatggaaggaaaaaaatgtacagattaaaattattcagtgttatgtactgtaagttaatatttttgtagaatggacatcaatctactttgcaaaatttggaggctatttcaacattgcactgtagaaatgtaaagtaatgtatgcaatgtaaaggaaagcccgcggtagctgagcgcttcataacagaatgttctaatcaagtacgtggtatttggggatgtctccaatattgctcttgtattctttctaattgggtttagtgactagttgaaggaaaatgttataacgccatttggttcacatgtgaagtgccctccatagccaaatgttgggatttttttttttttcgtttttggttggactgtttgcagatatttaaattttatgaaatttccaaagattttggttgataacccccttttaccttctaaatgatttgagatgttcttatgttcttactgtgtgttttaaatatatataaaagagccacaagcattt

SEQ ID NO: 110 - RNA, 4018 nt, Homo sapiens
  source 1..4018: mol_type = mRNA
caggcagcgctgcgtcctgctgcgcacgtgggaagccctggccccggccacccccgcgatgccgcgcgctccccgctgccgagccgtgcgctccctgctgcgcagccactaccgcgaggtgctgccgctggccacgttcgtgcggcgcctggggccccagggctggcggctggtgcagcgcggggacccggcggctttccgcgcgctggtggcccagtgcctggtgtgcgtgccctgggacgcacggccgccccccgccgccccctccttccgccaggtgtcctgcctgaaggagctggtggcccgagtgctgcagaggctgtgcgagcgcggcgcgaagaacgtgctggccttcggcttcgcgctgctggacggggcccgcgggggcccccccgaggccttcaccaccagcgtgcgcagctacctgcccaacacggtgaccgacgcactgcgggggagcggggcgtgggggctgctgctgcgccgcgtgggcgacgacgtgctggttcacctgctggcacgctgcgcgctctttgtgctggtggctcccagctgcgcctaccaggtgtgcgggccgccgctgtaccagctcggcgctgccactcaggcccggcccccgccacacgctagtggaccccgaaggcgtctgggatgcgaacgggcctggaaccatagcgtcagggaggccggggtccccctgggcctgccagccccgggtgcgaggaggcgcgggggcagtgccagccgaagtctgccgttgcccaagaggcccaggcgtggcgctgcccctgagccggagcggacgcccgttgggcaggggtcctgggcccacccgggcaggacgcgtggaccgagtgaccgtggtttctgtgtggtgtcacctgccagacccgccgaagaagccacctctttggagggtgcgctctctggcacgcgccactcccacccatccgtgggccgccagcaccacgcgggccccccatccacatcgcggccaccacgtccctgggacacgccttgtcccccggtgtacgccgagaccaagcacttcctctactcctcaggcgacaaggagcagctgcggccctccttcctactcagctctctgaggcccagcctgactggcgctcggaggctcgtggagaccatctttctgggttccaggccctggatgccagggactccccgcaggttgccccgcctgccccagcgctactggcaaatgcggcccctgtttctggagctgcttgggaaccacgcgcagtgcccctacggggtgctcctcaagacgcactgcccgctgcgagctgcggtcaccccagcagccggtgtctgtgcccgggagaagccccagggctctgtggcggcccccgaggaggaggacacagacccccgtcgcctggtgcagctgctccgccagcacagcagcccctggcaggtgtacggcttcgtgcgggcctgcctgcgccggctggtgcccccaggcctctggggctccaggcacaacgaacgccgcttcctcaggaacaccaagaagttcatctccctggggaagcatgccaagctctcgctgcaggagctgacgtggaagatgagcgtgcgggactgcgcttggctgcgcaggagcccaggggttggctgtgttccggccgcagagcaccgtctgcgtgaggagatcctggccaagttcctgcactggctgatgagtgtgtacgtcgtcgagctgctcaggtctttcttttatgtcacggagaccacgtttcaaaagaacaggctctttttctaccggaagagtgtctggagcaagttgcaaagcattggaatcagacagcacttgaagagggtgcagctgcgggagctgtcggaagcagaggtcaggcagcatcgggaagccaggcccgccctgctgacgtccagactccgcttcatccccaagcctgacgggctgcggccgattgtgaacatggactacgtcgtgggagccagaacgttccgcagagaaaagagggccgagcgtctcacctcgagggtgaaggcactgttcagcgtgctcaactacgagcgggcgcggcgccccggcctcctgggcgcctctgtgctgggcctggacgatatccacagggcctggcgcaccttcgtgctgcgtgtgcgggcccaggacccgccgcctgagctgtactttgtcaaggtggatgtgacgggcgcgtacgacaccatcccccaggacaggctcacggaggtcatcgccagcatcatcaaaccccagaacacgtactgcgtgcgtcggtatgccgtggtccagaaggccgcccatgggcacgtccgcaaggccttcaagagccacgtctctaccttgacagacctccagccgtacatgcgacagttcgtggctcacctgcaggagaccagcccgctgagggatgccgtcgtcatcgagcagagctcctccctgaatgaggccagcagtggcctcttcgacgtcttcctacgcttcatgtgccaccacgccgtgcgcatcaggggcaagtcctacgtccagtgccaggggatcccgcagggctccatcctctccacgctgctctgcagcctgtgctacggcgacatggagaacaagctgtttgcggggattcggcgggacgggctgctcctgcgtttggtggatgatttcttgttggtgacacctcacctcacccacgcgaaaaccttcctcaggaccctggtccgaggtgtccctgagtatggctgcgtggtgaacttgcggaagacagtggtgaacttccctgtagaagacgaggccctgggtggcacggcttttgttcagatgccggcccacggcctattcccctggtgcggcctgctgctggatacccggaccctggaggtgcagagcgactactccagctatgcccggacctccatcagagccagtctcaccttcaaccgcggcttcaaggctgggaggaacatgcgtcgcaaactctttggggtcttgcggctgaagtgtcacagcctgtttctggatttgcaggtgaacagcctccagacggtgtgcaccaacatctacaagatcctcctgctgcaggcgtacaggtttcacgcatgtgtgctgcagctcccatttcatcagcaagtttggaagaaccccacatttttcctgcgcgtcatctctgacacggcctccctctgctactccatcctgaaagccaagaacgcagggatgtcgctgggggccaagggcgccgccggccctctgccctccgaggccgtgcagtggctgtgccaccaagcattcctgctcaagctgactcgacaccgtgtcacctacgtgccactcctggggtcactcaggacagcccagacgcagctgagtcggaagctcccggggacgacgctgactgccctggaggccgcagccaacccggcactgccctcagacttcaagaccatcctggactgatggccacccgcccacagccaggccgagagcagacaccagcagccctgtcacgccgggctctacgtcccagggagggaggggcggcccacacccaggcccgcaccgctgggagtctgaggcctgagtgagtgtttggccgaggcctgcatgtccggctgaaggctgagtgtccggctgaggcctgagcgagtgtccagccaagggctgagtgtccagcacacctgccgtcttcacttccccacaggctggcgctcggctccaccccagggccagcttttcctcaccaggagcccggcttccactccccacataggaatagtccatccccagattcgccattgttcacccctcgccctgccctcctttgccttccacccccaccatccaggtggagaccctgagaaggaccctgggagctctgggaatttggagtgaccaaaggtgtgccctgtacacaggcgaggaccctgcacctggatgggggtccctgtgggtcaaattggggggaggtgctgtgggagtaaaatactgaatatatgagtttttcagttttgaaaaaaa

SEQ ID NO: 111 - RNA, 4326 nt, Homo sapiens
  source 1..4326: mol_type = mRNA
gtcagctgtgccccggtcgccgagtggcgaggaggtgacggtagccgccttcctatttccgcccggcgggcagcgctgcggggcgagtgccagcagagaggcgctcggtcctccctccgccctcccgcgccgggggcaggccctgcctagtctgcgtctttttcccccgcaccgcggcgccgctccgccactcgggcaccgcaggtagggcaggaggctggagagcctgctgcccgcccgcccgtaaaatggtcccctcggctggacagctcgccctgttcgctctgggtattgtgttggctgcgtgccaggccttggagaacagcacgtccccgctgagtgcagacccgcccgtggctgcagcagtggtgtcccattttaatgactgcccagattcccacactcagttctgcttccatggaacctgcaggtttttggtgcaggaggacaagccagcatgtgtctgccattctgggtacgttggtgcacgctgtgagcatgcggacctcctggccgtggtggctgccagccagaagaagcaggccatcaccgccttggtggtggtctccatcgtggccctggctgtccttatcatcacatgtgtgctgatacactgctgccaggtccgaaaacactgtgagtggtgccgggccctcatctgccggcacgagaagcccagcgccctcctgaagggaagaaccgcttgctgccactcagaaacagtggtctgaagagcccagaggaggagtttggccaggtggactgtggcagatcaataaagaaaggcttcttcaggacagcactgccagagatgcctgggtgtgccacagaccttcctacttggcctgtaatcacctgtgcagccttttgtgggccttcaaaactctgtcaagaactccgtctgcttggggttattcagtgtgacctagagaagaaatcagcggaccacgatttcaagacttgttaaaaaagaactgcaaagagacggactcctgttcacctaggtgaggtgtgtgcagcagttggtgtctgagtccacatgtgtgcagttgtcttctgccagccatggattccaggctatatatttctttttaatgggccacctccccacaacagaattctgcccaacacaggagatttctatagttattgttttctgtcatttgcctactggggaagaaagtgaaggaggggaaactgtttaatatcacatgaagaccctagctttaagagaagctgtatcctctaaccacgagaccctcaaccagcccaacatcttccatggacacatgacattgaagaccatcccaagctatcgccacccttggagatgatgtcttatttattagatggataatggttttatttttaatctcttaagtcaatgtaaaaagtataaaaccccttcagacttctacattaatgatgtatgtgttgctgactgaaaagctatactgattagaaatgtctggcctcttcaagacagctaaggcttgggaaaagtcttccagggtgcggagatggaaccagaggctgggttactggtaggaataaaggtaggggttcagaaatggtgccattgaagccacaaagccggtaaatgcctcaatacgttctgggagaaaacttagcaaatccatcagcagggatctgtcccctctgttggggagagaggaagagtgtgtgtgtctacacaggataaacccaatacatattgtactgctcagtgattaaatgggttcacttcctcgtgagccctcggtaagtatgtttagaaatagaacattagccacgagccataggcatttcaggccaaatccatgaaagggggaccagtcatttattttccattttgttgcttggttggtttgttgctttatttttaaaaggagaagtttaactttgctatttattttcgagcactaggaaaactattccagtaatttttttttcctcatttccattcaggatgccggctttattaacaaaaactctaacaagtcacctccactatgtgggtcttcctttcccctcaagagaaggagcaattgttcccctgagcatctgggtccatctgacccatggggcctgcctgtgagaaacagtgggtcccttcaaatacatagtggatagctcatccctaggaattttcattaaaatttggaaacagagtaatgaagaaataatatataaactccttatgtgaggaaatgctactaatatctgaaaagtgaaagatttctatgtattaactcttaagtgcacctagcttattacatcgtgaaaggtacatttaaaatatgttaaattggcttgaaattttcagagaattttgtcttcccctaattcttcttccttggtctggaagaacaatttctatgaattttctctttatttttttttataattcagacaattctatgacccgtgtcttcatttttggcactcttatttaacaatgccacacctgaagcacttggatctgttcagagctgaccccctagcaacgtagttgacacagctccaggtttttaaattactaaaataagttcaagtttacatcccttgggccagatatgtgggttgaggcttgactgtagcatcctgcttagagaccaatcaacggacactggtttttagacctctatcaatcagtagttagcatccaagagactttgcagaggcgtaggaatgaggctggacagatggcggaagcagaggttccctgcgaagacttgagatttagtgtctgtgaatgttctagttcctaggtccagcaagtcacacctgccagtgccctcatccttatgcctgtaacacacatgcagtgagaggcctcacatatacgcctccctagaagtgccttccaagtcagtcctttggaaaccagcaggtctgaaaaagaggctgcatcaatgcaagcctggttggaccattgtccatgcctcaggatagaacagcctggcttatttggggatttttcttctagaaatcaaatgactgataagcattggatccctctgccatttaatggcaatggtagtctttggttagctgcaaaaatactccatttcaagttaaaaatgcatcttctaatccatctctgcaagctccctgtgtttccttgccctttagaaaatgaattgttcactacaattagagaatcatttaacatcctgacctggtaagctgccacacacctggcagtggggagcatcgctgtttccaatggctcaggagacaatgaaaagcccccatttaaaaaaataacaaacattttttaaaaggcctccaatactcttatggagcctggatttttcccactgctctacaggctgtgactttttttaagcatcctgacaggaaatgttttcttctacatggaaagatagacagcagccaaccctgatctggaagacagggccccggctggacacacgtggaaccaagccagggatgggctggccattgtgtccccgcaggagagatgggcagaatggccctagagttcttttccctgagaaaggagaaaaagatgggattgccactcacccacccacactggtaagggaggagaatttgtgcttctggagcttctcaagggattgtgttttgcaggtacagaaaactgcctgttatcttcaagccaggttttcgagggcacatgggtcaccagttgctttttcagtcaatttggccgggatggactaatgaggctctaacactgctcaggagacccctgccctctagttggttctgggctttgatctcttccaacctgcccagtcacagaaggaggaatgactcaaatgcccaaaaccaagaacacattgcagaagtaagacaaacatgtatatttttaaatgttctaacataagacctgttctctctagccattgatttaccaggctttctgaaagatctagtggttcacacagagagagagagagtactgaaaaagcaactcctcttcttagtcttaataatttactaaaatggtcaacttttcattatctttattataataaacctgatgcttttttttagaactccttactctgatgtctgtatatgttgcactgaaaaggttaatatttaatgttttaatttattttgtgtggtaagttaattttgatttctgtaatgtgttaatgtgattagcagttattttccttaatatctgaattatacttaaagagtagtgagcaatataagacgcaattgtgtttttcagtaatgtgcattgttattgagttgtactgtaccttatttggaaggatgaaggaatgaatctttttttcctaaatcaaaaaaaaaaaaaaaaaa

SEQ ID NO: 112 - RNA, 2217 nt, Homo sapiens
  source 1..2217: mol_type = mRNA
ccccgccgccgccgcccttcgcgccctgggccatctccctcccacctccctccgcggagcagccagacagcgagggccccggccgggggcaggggggacgccccgtccggggcacccccccggctctgagccgcccgcggggccggcctcggcccggagcggaggaaggagtcgccgaggagcagcctgaggccccagagtctgagacgagccgccgccgcccccgccactgcggggaggagggggaggaggagcgggaggagggacgagctggtcgggagaagaggaaaaaaacttttgagacttttccgttgccgctgggagccggaggcgcggggacctcttggcgcgacgctgccccgcgaggaggcaggacttggggaccccagaccgcctccctttgccgccggggacgcttgctccctccctgccccctacacggcgtccctcaggcgcccccattccggaccagccctcgggagtcgccgacccggcctcccgcaaagacttttccccagacctcgggcgcaccccctgcacgccgccttcatccccggcctgtctcctgagcccccgcgcatcctagaccctttctcctccaggagacggatctctctccgacctgccacagatcccctattcaagaccacccaccttctggtaccagatcgcgcccatctaggttatttccgtgggatactgagacacccccggtccaagcctcccctccaccactgcgcccttctccctgaggacctcagctttccctcgaggccctcctaccttttgccgggagacccccagcccctgcaggggcggggcctccccaccacaccagccctgttcgcgctctcggcagtgccggggggcgccgcctcccccatgccgccctccgggctgcggctgctgccgctgctgctaccgctgctgtggctactggtgctgacgcctggccggccggccgcgggactatccacctgcaagactatcgacatggagctggtgaagcggaagcgcatcgaggccatccgcggccagatcctgtccaagctgcggctcgccagccccccgagccagggggaggtgccgcccggcccgctgcccgaggccgtgctcgccctgtacaacagcacccgcgaccgggtggccggggagagtgcagaaccggagcccgagcctgaggccgactactacgccaaggaggtcacccgcgtgctaatggtggaaacccacaacgaaatctatgacaagttcaagcagagtacacacagcatatatatgttcttcaacacatcagagctccgagaagcggtacctgaacccgtgttgctctcccgggcagagctgcgtctgctgaggctcaagttaaaagtggagcagcacgtggagctgtaccagaaatacagcaacaattcctggcgatacctcagcaaccggctgctggcacccagcgactcgccagagtggttatcttttgatgtcaccggagttgtgcggcagtggttgagccgtggaggggaaattgagggctttcgccttagcgcccactgctcctgtgacagcagggataacacactgcaagtggacatcaacgggttcactaccggccgccgaggtgacctggccaccattcatggcatgaaccggcctttcctgcttctcatggccaccccgctggagagggcccagcatctgcaaagctcccggcaccgccgagccctggacaccaactattgcttcagctccacggagaagaactgctgcgtgcggcagctgtacattgacttccgcaaggacctcggctggaagtggatccacgagcccaagggctaccatgccaacttctgcctcgggccctgcccctacatttggagcctggacacgcagtacagcaaggtcctggccctgtacaaccagcataacccgggcgcctcggcggcgccgtgctgcgtgccgcaggcgctggagccgctgcccatcgtgtactacgtgggccgcaagcccaaggtggagcagctgtccaacatgatcgtgcgctcctgcaagtgcagctgaggtcccgccccgccccgccccgccccggcaggcccggccccaccccgccccgcccccgctgccttgcccatgggggctgtatttaaggacacccgtgccccaagcccacctggggccccattaaagatggagagaggactgcggaaaaaaaaaaaaaaaaaa

SEQ ID NO: 113 - RNA, 5781 nt, Homo sapiens
  source 1..5781: mol_type = mRNA
tagcttcctcttgctgtttctttagccactggtctgcaggcgttttcttcttctaacttcctctcctgtgacaaaagagataactattagagaaacaaaagtccagaatgctaaggttgccgctttcacttcctctcaccctttagcccagaactgctttgaatacaccaattgctgtggggcggctcgaggaagagaagacaccagtgcctcagaaactgctcggtcagacggtgatagcgagccacgcattcacagggccactgctgctcacagaagcagtgaggatgatgccaggatgatgtctgcctcgcgcctggctgggactctgatcccagccatggccttcctctcctgcgtgagaccagaaagctgggagccctgcgtggagacttggccctaaaccacacagaagagctggcatgaaacccagagctttcagactccggagcctcagcccttcaccccgattccattgcttcttgctaaatgctgccgttttatcacggaggtggttcctaatattacttatcaatgcatggagctgaatttctacaaaatccccgacaacctccccttctcaaccaagaacctggacctgagctttaatcccctgaggcatttaggcagctatagcttcttcagtttcccagaactgcaggtgctggatttatccaggtgtgaaatccagacaattgaagatggggcatatcagagcctaagccacctctctaccttaatattgacaggaaaccccatccagagtttagccctgggagccttttctggactatcaagtttacagaagctggtggctgtggagacaaatctagcatctctagagaacttccccattggacatctcaaaactttgaaagaacttaatgtggctcacaatcttatccaatctttcaaattacctgagtatttttctaatctgaccaatctagagcacttggacctttccagcaacaagattcaaagtatttattgcacagacttgcgggttctacatcaaatgcccctactcaatctctctttagacctgtccctgaaccctatgaactttatccaaccaggtgcatttaaagaaattaggcttcataagctgactttaagaaataattttgatagtttaaatgtaatgaaaacttgtattcaaggtctggctggtttagaagtccatcgtttggttctgggagaatttagaaatgaaggaaacttggaaaagtttgacaaatctgctctagagggcctgtgcaatttgaccattgaagaattccgattagcatacttagactactacctcgatgatattattgacttatttaattgtttgacaaatgtttcttcattttccctggtgagtgtgactattgaaagggtaaaagacttttcttataatttcggatggcaacatttagaattagttaactgtaaatttggacagtttcccacattgaaactcaaatctctcaaaaggcttactttcacttccaacaaaggtgggaatgctttttcagaagttgatctaccaagccttgagtttctagatctcagtagaaatggcttgagtttcaaaggttgctgttctcaaagtgattttgggacaaccagcctaaagtatttagatctgagcttcaatggtgttattaccatgagttcaaacttcttgggcttagaacaactagaacatctggatttccagcattccaatttgaaacaaatgagtgagttttcagtattcctatcactcagaaacctcatttaccttgacatttctcatactcacaccagagttgctttcaatggcatcttcaatggcttgtccagtctcgaagtcttgaaaatggctggcaattctttccaggaaaacttccttccagatatcttcacagagctgagaaacttgaccttcctggacctctctcagtgtcaactggagcagttgtctccaacagcatttaactcactctccagtcttcaggtactaaatatgagccacaacaacttcttttcattggatacgtttccttataagtgtctgaactccctccaggttcttgattacagtctcaatcacataatgacttccaaaaaacaggaactacagcattttccaagtagtctagctttcttaaatcttactcagaatgactttgcttgtacttgtgaacaccagagtttcctgcaatggatcaaggaccagaggcagctcttggtggaagttgaacgaatggaatgtgcaacaccttcagataagcagggcatgcctgtgctgagtttgaatatcacctgtcagatgaataagaccatcattggtgtgtcggtcctcagtgtgcttgtagtatctgttgtagcagttctggtctataagttctattttcacctgatgcttcttgctggctgcataaagtatggtagaggtgaaaacatctatgatgcctttgttatctactcaagccaggatgaggactgggtaaggaatgagctagtaaagaatttagaagaaggggtgcctccatttcagctctgccttcactacagagactttattcccggtgtggccattgctgccaacatcatccatgaaggtttccataaaagccgaaaggtgattgttgtggtgtcccagcacttcatccagagccgctggtgtatctttgaatatgagattgctcagacctggcagtttctgagcagtcgtgctggtatcatcttcattgtcctgcagaaggtggagaagaccctgctcaggcagcaggtggagctgtaccgccttctcagcaggaacacttacctggagtgggaggacagtgtcctggggcggcacatcttctggagacgactcagaaaagccctgctggatggtaaatcatggaatccagaaggaacagtgggtacaggatgcaattggcaggaagcaacatctatctgaagaggaaaaataaaaacctcctgaggcatttcttgcccagctgggtccaacacttgttcagttaataagtattaaatgctgccacatgtcaggccttatgctaagggtgagtaattccatggtgcactagatatgcagggctgctaatctcaaggagcttccagtgcagagggaataaatgctagactaaaatacagagtcttccaggtgggcatttcaaccaactcagtcaaggaacccatgacaaagaaagtcatttcaactcttacctcatcaagttgaataaagacagagaaaacagaaagagacattgttcttttcctgagtcttttgaatggaaattgtattatgttatagccatcataaaaccattttggtagttttgactgaactgggtgttcactttttcctttttgattgaatacaatttaaattctacttgatgactgcagtcgtcaaggggctcctgatgcaagatgccccttccattttaagtctgtctccttacagaggttaaagtctagtggctaattcctaaggaaacctgattaacacatgctcacaaccatcctggtcattctcgagcatgttctattttttaactaatcacccctgatatatttttatttttatatatccagttttcatttttttacgtcttgcctataagctaatatcataaataaggttgtttaagacgtgcttcaaatatccatattaaccactatttttcaaggaagtatggaaaagtacactctgtcactttgtcactcgatgtcattccaaagttattgcctactaagtaatgactgtcatgaaagcagcattgaaataatttgtttaaagggggcactcttttaaacgggaagaaaatttccgcttcctggtcttatcatggacaatttgggctagaggcaggaaggaagtgggatgacctcaggaggtcaccttttcttgattccagaaacatatgggctgataaacccggggtgacctcatgaaatgagttgcagcagaagtttatttttttcagaacaagtgatgtttgatggacctctgaatctctttagggagacacagatggctgggatccctcccctgtacccttctcactgccaggagaactacgtgtgaaggtattcaaggcagggagtatacattgctgtttcctgttgggcaatgctccttgaccacattttgggaagagtggatgttatcattgagaaaacaatgtgtctggaattaatggggttcttataaagaaggttcccagaaaagaatgttcatccagcctcctcagaaacagaacattcaagaaaaggacaatcaggatgtcatcagggaaatgaaaataaaaaccacaatgagatatcaccttataccaggtagaatggctactataaaaaaatgaagtgtcatcaaggatatagagaaattggaacccttcttcactgctggagggaatggaaaatggtgtagccgttatgaaaaacagtacggaggtttctcaaaaattaaaaatagaactgctatatgatccagcaatctcacttctgtatatatacccaaaataattgaaatcagaatttcaagaaaatatttacactcccatgttcattgtggcactcttcacaatcactgtttccaaagttatggaaacaacccaaatttccattgaaaaataaatggacaaagaaaatgtgcatatacgtacaatgggatattattcagcctaaaaaaagggggaatcctgttatttatgacaacatgaataaacccggaggccattatgctatgtaaaatgagcaagtaacagaaagacaaatactgcctgatttcatttatatgaggttctaaaatagtcaaactcatagaagcagagaatagaacagtggttcctagggaaaaggaggaagggagaaatgaggaaatagggagttgtctaattggtataaaattatagtatgcaagatgaattagctctaaagatcagctgtatagcagagttcgtataatgaacaatactgtattatgcacttaacattttgttaagagggtacctctcatgttaagtgttcttaccatatacatatacacaaggaagcttttggaggtgatggatatatttattaccttgattgtggtgatggtttgacaggtatgtgactatgtctaaactcatcaaattgtatacattaaatatatgcagttttataatatcaattatgtctgaatgaagctataaaaaagaaaagacaacaaaattcagttgtcaaaactggaaatatgaccacagtcagaagtgtttgttactgagtgtttcagagtgtgtttggtttgagcaggtctagggtgattgaacatccctgggtgtgtttccatgtctcatgtactagtgaaagtagatgtgtgcatttgtgcacatatccctatgtatccctatcagggctgtgtgtatttgaaagtgtgtgtgtccgcatgatcatatctgtatagaagagagtgtgattatatttcttgaagaatacatccatttgaaatggatgtctatggctgtttgagatgagttctctactcttgtgcttgtacagtagtctccccttatcccttatgcttggtggatacgttcttagaccccaagtggatctctgagaccgcagatggtaccaaacctcatatatgcaatattttttcctatacataaatacctaagataaagttcatcttctgaattaggcacagtaagagattaacaataactaacaataaaattgaatagttataataatatattgtaataaaagttatgtgaatgtgatctctttctttctctctctcaaaat

SEQ ID NO: 114 - RNA, 4154 nt, Homo sapiens
  source 1..4154: mol_type = mRNA
acttggacgcgcttgcggaggattgcgttgacgagactcttatttattgtcaccaacctgtggtggaatttgcagttgcacattggatctgattcgccccgccccgaatgacgcctgcccggaggcagtgaaagtacagccgcgccgccccaagtcagcctggacacataaatcagcacgcggccggagaaccccgcaatctctgcgcccacaaaatacaccgacgatgcccgatctactttaagggctgaaacccacgggcctgagagactataagagcgttccctaccgccatggaacaacggggacagaacgccccggccgcttcgggggcccggaaaaggcacggcccaggacccagggaggcgcggggagccaggcctgggccccgggtccccaagacccttgtgctcgttgtcgccgcggtcctgctgttggtctcagctgagtctgctctgatcacccaacaagacctagctccccagcagagagcggccccacaacaaaagaggtccagcccctcagagggattgtgtccacctggacaccatatctcagaagacggtagagattgcatctcctgcaaatatggacaggactatagcactcactggaatgacctccttttctgcttgcgctgcaccaggtgtgattcaggtgaagtggagctaagtccctgcaccacgaccagaaacacagtgtgtcagtgcgaagaaggcaccttccgggaagaagattctcctgagatgtgccggaagtgccgcacagggtgtcccagagggatggtcaaggtcggtgattgtacaccctggagtgacatcgaatgtgtccacaaagaatcaggtacaaagcacagtggggaagtcccagctgtggaggagacggtgacctccagcccagggactcctgcctctccctgttctctctcaggcatcatcataggagtcacagttgcagccgtagtcttgattgtggctgtgtttgtttgcaagtctttactgtggaagaaagtccttccttacctgaaaggcatctgctcaggtggtggtggggaccctgagcgtgtggacagaagctcacaacgacctggggctgaggacaatgtcctcaatgagatcgtgagtatcttgcagcccacccaggtccctgagcaggaaatggaagtccaggagccagcagagccaacaggtgtcaacatgttgtcccccggggagtcagagcatctgctggaaccggcagaagctgaaaggtctcagaggaggaggctgctggttccagcaaatgaaggtgatcccactgagactctgagacagtgcttcgatgactttgcagacttggtgccctttgactcctgggagccgctcatgaggaagttgggcctcatggacaatgagataaaggtggctaaagctgaggcagcgggccacagggacaccttgtacacgatgctgataaagtgggtcaacaaaaccgggcgagatgcctctgtccacaccctgctggatgccttggagacgctgggagagagacttgccaagcagaagattgaggaccacttgttgagctctggaaagttcatgtatctagaaggtaatgcagactctgccatgtcctaagtgtgattctcttcaggaagtcagaccttccctggtttaccttttttctggaaaaagcccaactggactccagtcagtaggaaagtgccacaattgtcacatgaccggtactggaagaaactctcccatccaacatcacccagtggatggaacatcctgtaacttttcactgcacttggcattatttttataagctgaatgtgataataaggacactatggaaatgtctggatcattccgtttgtgcgtactttgagatttggtttgggatgtcattgttttcacagcacttttttatcctaatgtaaatgctttatttatttatttgggctacattgtaagatccatctacacagtcgttgtccgacttcacttgatactatatgatatgaaccttttttgggtggggggtgcggggcagttcactctgtctcccaggctggagtgcaatggtgcaatcttggctcactatagccttgacctctcaggctcaagcgattctcccacctcagccatccaaatagctgggaccacaggtgtgcaccaccacgcccggctaattttttgtattttgtctagatataggggctctctatgttgctcagggtggtctcgaattcctggactcaagcagtctgcccacctcagactcccaaagcggtggaattagaggcgtgagcccccatgcttggccttacctttctacttttataattctgtatgttattattttatgaacatgaagaaactttagtaaatgtacttgtttacatagttatgtgaatagattagataaacataaaaggaggagacatacaatgggggaagaagaagaagtcccctgtaagatgtcactgtctgggttccagccctccctcagatgtactttggcttcaatgattggcaacttctacaggggccagtcttttgaactggacaaccttacaagtatatgagtattatttataggtagttgtttacatatgagtcgggaccaaagagaactggatccacgtgaagtcctgtgtgtggctggtccctacctgggcagtctcatttgcacccatagcccccatctatggacaggctgggacagaggcagatgggttagatcacacataacaatagggtctatgtcatatcccaagtgaacttgagccctgtttgggctcaggagatagaagacaaaatctgtctcccacgtctgccatggcatcaagggggaagagtagatggtgcttgagaatggtgtgaaatggttgccatctcaggagtagatggcccggctcacttctggttatctgtcaccctgagcccatgagctgccttttagggtacagattgcctacttgaggaccttggccgctctgtaagcatctgactcatctcagaaatgtcaattcttaaacactgtggcaacaggacctagaatggctgacgcattaaggttttcttcttgtgtcctgttctattattgttttaagacctcagtaaccatttcagcctctttccagcaaacccttctccatagtatttcagtcatggaaggatcatttatgcaggtagtcattccaggagtttttggtcttttctgtctcaaggcattgtgtgttttgttccgggactggtttgggtgggacaaagttagaattgcctgaagatcacacattcagactgttgtgtctgtggagttttaggagtggggggtgacctttctggtctttgcacttccatcctctcccacttccatctggcatcccacgcgttgtcccctgcacttctggaaggcacagggtgctgctgcctcctggtctttgcctttgctgggccttctgtgcaggacgctcagcctcagggctcagaaggtgccagtccggtcccaggtcccttgtcccttccacagaggccttcctagaagatgcatctagagtgtcagccttatcagtgtttaagatttttcttttatttttaatttttttgagacagaatctcactctctcgcccaggctggagtgcaacggtacgatcttggctcagtgcaacctccgcctcctgggttcaagcgattctcgtgcctcagcctccggagtagctgggattgcaggcacccgccaccacgcctggctaatttttgtatttttagtagagacggggtttcaccatgttggtcaggctggtctcgaactcctgacctcaggtgatccaccttggcctccgaaagtgctgggattacaggcgtgagccaccagccaggccaagctattcttttaaagtaagcttcctgacgacatgaaataattgggggttttgttgtttagttacattaggctttgctatatccccaggccaaatagcatgtgacacaggacagccatagtatagtgtgtcactcgtggttggtgtcctttcatgcttctgccctgtcaaaggtccctatttgaaatgtgttataatacaaacaaggaagcacattgtgtacaaaatacttatgtatttatgaatccatgaccaaattaaatatgaaaccttatataaaaa

SEQ ID NO: 115 - RNA, 3677 nt, Homo sapiens
  source 1..3677: mol_type = mRNA
tcgcggaggcttggggcagccgggtagctcggaggtcgtggcgctgggggctagcaccagcgctctgtcgggaggcgcagcggttaggtggaccggtcagcggactcaccggccagggcgctcggtgctggaatttgatattcattgatccgggttttatccctcttcttttttcttaaacatttttttttaaaactgtattgtttctcgttttaatttatttttgcttgccattccccacttgaatcgggccgacggcttggggagattgctctacttccccaaatcactgtggattttggaaaccagcagaaagaggaaagaggtagcaagagctccagagagaagtcgaggaagagagagacggggtcagagagagcgcgcgggcgtgcgagcagcgaaagcgacaggggcaaagtgagtgacctgcttttgggggtgaccgccggagcgcggcgtgagccctcccccttgggatcccgcagctgaccagtcgcgctgacggacagacagacagacaccgcccccagccccagctaccacctcctccccggccggcggcggacagtggacgcggcggcgagccgcgggcaggggccggagcccgcgcccggaggcggggtggagggggtcggggctcgcggcgtcgcactgaaacttttcgtccaacttctgggctgttctcgcttcggaggagccgtggtccgcgcgggggaagccgagccgagcggagccgcgagaagtgctagctcgggccgggaggagccgcagccggaggagggggaggaggaagaagagaaggaagaggagagggggccgcagtggcgactcggcgctcggaagccgggctcatggacgggtgaggcggcggtgtgcgcagacagtgctccagccgcgcgcgctccccaggccctggcccgggcctcgggccggggaggaagagtagctcgccgaggcgccgaggagagcgggccgccccacagcccgagccggagagggagcgcgagccgcgccggccccggtcgggcctccgaaaccatgaactttctgctgtcttgggtgcattggagccttgccttgctgctctacctccaccatgccaagtggtcccaggctgcacccatggcagaaggaggagggcagaatcatcacgaagtggtgaagttcatggatgtctatcagcgcagctactgccatccaatcgagaccctggtggacatcttccaggagtaccctgatgagatcgagtacatcttcaagccatcctgtgtgcccctgatgcgatgcgggggctgctgcaatgacgagggcctggagtgtgtgcccactgaggagtccaacatcaccatgcagattatgcggatcaaacctcaccaaggccagcacataggagagatgagcttcctacagcacaacaaatgtgaatgcagaccaaagaaagatagagcaagacaagaaaaaaaatcagttcgaggaaagggaaaggggcaaaaacgaaagcgcaagaaatcccggtataagtcctggagcgtgtacgttggtgcccgctgctgtctaatgccctggagcctccctggcccccatccctgtgggccttgctcagagcggagaaagcatttgtttgtacaagatccgcagacgtgtaaatgttcctgcaaaaacacagactcgcgttgcaaggcgaggcagcttgagttaaacgaacgtacttgcagatgtgacaagccgaggcggtgagccgggcaggaggaaggagcctccctcagggtttcgggaaccagatctctcaccaggaaagactgatacagaacgatcgatacagaaaccacgctgccgccaccacaccatcaccatcgacagaacagtccttaatccagaaacctgaaatgaaggaagaggagactctgcgcagagcactttgggtccggagggcgagactccggcggaagcattcccgggcgggtgacccagcacggtccctcttggaattggattcgccattttatttttcttgctgctaaatcaccgagcccggaagattagagagttttatttctgggattcctgtagacacacccacccacatacatacatttatatatatatatattatatatatataaaaataaatatctctattttatatatataaaatatatatattctttttttaaattaacagtgctaatgttattggtgtcttcactggatgtatttgactgctgtggacttgagttgggaggggaatgttcccactcagatcctgacagggaagaggaggagatgagagactctggcatgatcttttttttgtcccacttggtggggccagggtcctctcccctgcccaggaatgtgcaaggccagggcatgggggcaaatatgacccagttttgggaacaccgacaaacccagccctggcgctgagcctctctaccccaggtcagacggacagaaagacagatcacaggtacagggatgaggacaccggctctgaccaggagtttggggagcttcaggacattgctgtgctttggggattccctccacatgctgcacgcgcatctcgcccccaggggcactgcctggaagattcaggagcctgggcggccttcgcttactctcacctgcttctgagttgcccaggagaccactggcagatgtcccggcgaagagaagagacacattgttggaagaagcagcccatgacagctccccttcctgggactcgccctcatcctcttcctgctccccttcctggggtgcagcctaaaaggacctatgtcctcacaccattgaaaccactagttctgtccccccaggagacctggttgtgtgtgtgtgagtggttgaccttcctccatcccctggtccttcccttcccttcccgaggcacagagagacagggcaggatccacgtgcccattgtggaggcagagaaaagagaaagtgttttatatacggtacttatttaatatccctttttaattagaaattaaaacagttaatttaattaaagagtagggttttttttcagtattcttggttaatatttaatttcaactatttatgagatgtatcttttgctctctcttgctctcttatttgtaccggtttttgtatataaaattcatgtttccaatctctctctccctgatcggtgacagtcactagcttatcttgaacagatatttaattttgctaacactcagctctgccctccccgatcccctggctccccagcacacattcctttgaaataaggtttcaatatacatctacatactatatatatatttggcaacttgtatttgtgtgtatatatatatatatatgtttatgtatatatgtgattctgataaaatagacattgctattctgttttttatatgtaaaaacaaaacaagaaaaaatagagaattctacatactaaatctctctccttttttaattttaatatttgttatcatttatttattggtgctactgtttatccgtaataattgtggggaaaagatattaacatcacgtctttgtctctagtgcagtttttcgagatattccgtagtacatatttatttttaaacaacgacaaagaaatacagatatatcttaaaaaaaaaaaagcattttgtattaaagaatttaattctgatctcaaaaaaaaaaaaaaaaaa

SEQ ID NO: 116 - RNA, 3037 nt, Homo sapiens
  source 1..3037: mol_type = mRNA
agctggggtaaggagttcaaggcagcgcccacacccgggggctctccgcaacccgaccgcctgtccgctcccccacttcccgccctccctcccacctactcattcacccacccacccacccagagccgggacggcagcccaggcgcccgggccccgccgtctcctcgccgcgatcctggacttcctcttgctgcaggacccggcttccacgtgtgtcccggagccggcgtctcagcacacgctccgctccgggcctgggtgcctacagcagccagagcagcagggagtccgggacccgggcggcatctgggccaagttaggcgccgccgaggccagcgctgaacgtctccagggccggaggagccgcggggcgtccgggtctgagccgcagcaaatgggctccgacgtgcgggacctgaacgcgctgctgcccgccgtcccctccctgggtggcggcggcggctgtgccctgcctgtgagcggcgcggcgcagtgggcgccggtgctggactttgcgcccccgggcgcttcggcttacgggtcgttgggcggccccgcgccgccaccggctccgccgccacccccgccgccgccgcctcactccttcatcaaacaggagccgagctggggcggcgcggagccgcacgaggagcagtgcctgagcgccttcactgtccacttttccggccagttcactggcacagccggagcctgtcgctacgggcccttcggtcctcctccgcccagccaggcgtcatccggccaggccaggatgtttcctaacgcgccctacctgcccagctgcctcgagagccagcccgctattcgcaatcagggttacagcacggtcaccttcgacgggacgcccagctacggtcacacgccctcgcaccatgcggcgcagttccccaaccactcattcaagcatgaggatcccatgggccagcagggctcgctgggtgagcagcagtactcggtgccgcccccggtctatggctgccacacccccaccgacagctgcaccggcagccaggctttgctgctgaggacgccctacagcagtgacaatttataccaaatgacatcccagcttgaatgcatgacctggaatcagatgaacttaggagccaccttaaagggagttgctgctgggagctccagctcagtgaaatggacagaagggcagagcaaccacagcacagggtacgagagcgataaccacacaacgcccatcctctgcggagcccaatacagaatacacacgcacggtgtcttcagaggcattcaggatgtgcgacgtgtgcctggagtagccccgactcttgtacggtcggcatctgagaccagtgagaaacgccccttcatgtgtgcttacccaggctgcaataagagatattttaagctgtcccacttacagatgcacagcaggaagcacactggtgagaaaccataccagtgtgacttcaaggactgtgaacgaaggttttctcgttcagaccagctcaaaagacaccaaaggagacatacaggtgtgaaaccattccagtgtaaaacttgtcagcgaaagttctcccggtccgaccacctgaagacccacaccaggactcatacaggtaaaacaagtgaaaagcccttcagctgtcggtggccaagttgtcagaaaaagtttgcccggtcagatgaattagtccgccatcacaacatgcatcagagaaacatgaccaaactccagctggcgctttgaggggtctccctcggggaccgttcagtgtcccaggcagcacagtgtgtgaactgctttcaagtctgactctccactcctcctcactaaaaaggaaacttcagttgatcttcttcatccaacttccaagacaagataccggtgcttctggaaactaccaggtgtgcctggaagagttggtctctgccctgcctacttttagttgactcacaggccctggagaagcagctaacaatgtctggttagttaaaagcccattgccatttggtgtggattttctactgtaagaagagccatagctgatcatgtccccctgacccttcccttctttttttatgctcgttttcgctggggatggaattattgtaccattttctatcatggaatatttataggccagggcatgtgtatgtgtctgctaatgtaaactttgtcatggtttccatttactaacagcaacagcaagaaataaatcagagagcaaggcatcgggggtgaatcttgtctaacattcccgaggtcagccaggctgctaacctggaaagcaggatgtagttctgccaggcaacttttaaagctcatgcatttcaagcagctgaagaaaaaatcagaactaaccagtacctctgtatagaaatctaaaagaattttaccattcagttaattcaatgtgaacactggcacactgctcttaagaaactatgaagatctgagatttttttgtgtatgtttttgactcttttgagtggtaatcatatgtgtctttatagatgtacatacctccttgcacaaatggaggggaattcattttcatcactgggagtgtccttagtgtataaaaaccatgctggtatatggcttcaagttgtaaaaatgaaagtgactttaaaagaaaataggggatggtccaggatctccactgataagactgtttttaagtaacttaaggacctttgggtctacaagtatatgtgaaaaaaatgagacttactgggtgaggaaatccattgtttaaagatggtcgtgtgtgtgtgtgtgtgtgtgtgtgtgtgtgtgttgtgttgtgttttgttttttaagggagggaatttattatttaccgttgcttgaaattactgtgtaaatatatgtctgataatgatttgctctttgacaactaaaattaggactgtataagtactagatgcatcactgggtgttgatcttacaagatattgatgataacacttaaaattgtaacctgcatttttcactttgctctcaattaaagtctattcaaaaggaaaaaaaaaaaaa

SEQ ID NO: 117 - RNA, 8460 nt, Homo sapiens
  source 1..8460: mol_type = mRNA
gctggggccaagccgcagagcggagttggcatttccagattggggctcgggccgcgcctcctccgggaccctccccttggaccgagccgatcgccgcggggcagttcgggccggctgtcctggcgcgaaaaggtggacaagtcctattttcaagagaagatgacttttaacagttttgaaggatctaaaacttgtgtacctgcagacatcaataaggaagaagaatttgtagaagagtttaatagattaaaaacttttgctaattttccaagtggtagtcctgtttcagcatcaacactggcacgagcagggtttctttatactggtgaaggagataccgtgcggtgctttagttgtcatgcagctgtagatagatggcaatatggagactcagcagttggaagacacaggaaagtatccccaaattgcagatttatcaacggcttttatcttgaaaatagtgccacgcagtctacaaattctggtatccagaatggtcagtacaaagttgaaaactatctgggaagcagagatcattttgccttagacaggccatctgagacacatgcagactatcttttgagaactgggcaggttgtagatatatcagacaccatatacccgaggaaccctgccatgtatagtgaagaagctagattaaagtcctttcagaactggccagactatgctcacctaaccccaagagagttagcaagtgctggactctactacacaggtattggtgaccaagtgcagtgcttttgttgtggtggaaaactgaaaaattgggaaccttgtgatcgtgcctggtcagaacacaggcgacactttcctaattgcttctttgttttgggccggaatcttaatattcgaagtgaatctgatgctgtgagttctgataggaatttcccaaattcaacaaatcttccaagaaatccatccatggcagattatgaagcacggatctttacttttgggacatggatatactcagttaacaaggagcagcttgcaagagctggattttatgctttaggtgaaggtgataaagtaaagtgctttcactgtggaggagggctaactgattggaagcccagtgaagacccttgggaacaacatgctaaatggtatccagggtgcaaatatctgttagaacagaagggacaagaatatataaacaatattcatttaactcattcacttgaggagtgtctggtaagaactactgagaaaacaccatcactaactagaagaattgatgataccatcttccaaaatcctatggtacaagaagctatacgaatggggttcagtttcaaggacattaagaaaataatggaggaaaaaattcagatatctgggagcaactataaatcacttgaggttctggttgcagatctagtgaatgctcagaaagacagtatgcaagatgagtcaagtcagacttcattacagaaagagattagtactgaagagcagctaaggcgcctgcaagaggagaagctttgcaaaatctgtatggatagaaatattgctatcgtttttgttccttgtggacatctagtcacttgtaaacaatgtgctgaagcagttgacaagtgtcccatgtgctacacagtcattactttcaagcaaaaaatttttatgtcttaatctaactctatagtaggcatgttatgttgttcttattaccctgattgaatgtgtgatgtgaactgactttaagtaatcaggattgaattccattagcatttgctaccaagtaggaaaaaaaatgtacatggcagtgttttagttggcaatataatctttgaatttcttgatttttcagggtattagctgtattatccattttttttactgttatttaattgaaaccatagactaagaataagaagcatcatactataactgaacacaatgtgtattcatagtatactgatttaatttctaagtgtaagtgaattaatcatctggattttttattcttttcagataggcttaacaaatggagctttctgtatataaatgtggagattagagttaatctccccaatcacataatttgttttgtgtgaaaaaggaataaattgttccatgctggtggaaagatagagattgtttttagaggttggttgttgtgttttaggattctgtccattttcttttaaagttataaacacgtacttgtgcgaattatttttttaaagtgatttgccatttttgaaagcgtatttaatgatagaatactatcgagccaacatgtactgacatggaaagatgtcaaagatatgttaagtgtaaaatgcaagtggcaaaacactatgtatagtctgagccagatcaaagtatgtatgtttttaatatgcatagaacaaaagatttggaaagatatacaccaaactgttaaatgtggtttctcttcggggagggggggattgggggaggggccccagaggggttttataggggccttttcactttctacttttttcattttgttctgttcgaattttttataagtatgtattacttttgtaatcagaatttttagaaagtattttgctgatttaaaggcttaggcatgttcaaacgcctgcaaaactacttatcactcagctttagtttttctaatccaagaaggcagggcagttaacctttttggtgccaatgtgaaatgtaaatgattttatgtttttcctgctttgtggatgaaaaatatttctgagtggtagttttttgacaggtagaccatgtcttatcttgtttcaaaataagtatttctgattttgtaaaatgaaatataaaatatgtctcagatcttccaattaattagtaaggattcatccttaatccttgctagtttaagcctgcctaagtcactttactaaaagatctttgttaactcagtattttaaacatctgtcagcttatgtaggtaaaagtagaagcatgtttgtacactgcttgtagttatagtgacagctttccatgttgagattctcatatcatcttgtatcttaaagtttcatgtgagtttttaccgttaggatgattaagatgtatataggacaaaatgttaagtctttcctctacctacatttgttttcttggctagtaatagtagtagatacttctgaaataaatgttctctcaagatccttaaaacctcttggaaattataaaaatattggcaagaaaagaagaatagttgtttaaatattttttaaaaaacacttgaataagaatcagtagggtataaactagaagtttaaaaatgcttcatagaacgtccagggtttacattacaagattctcacaacaaacctattgtagaggtgagtaaggcatgttactacagaggaaagtttgagagtaaaactgtaaaaaattatatttttgttgtactttctaagagaaagagtattgttatgttctcctaacttctgttgattactactttaagtgatattcatttaaaacattgcaaatttattttatttatttaattttctttttgagatggagtcttgcttgtcacccaggctggagtgcagtggagtgatctctgctcactgcaacctccgccttctgggttcaagcgattctcgtgcctcagcttcctgagtagctggaattacaggcaggtgccaccatgcccgactaatttttttttatttttagtagagacggggtttcaccatgttggccaggctggtatcaaactcctgacctcaagagatccactcgccttgccctcccaaagtgctgggattacaggcttgagccaccacgcccggctaaaacattgcaaatttaaatgagagttttaaaaattaaataatgactgccctgtttctgttttagtatgtaaatcctcagttcttcacctttgcactgtctgccacttagtttggttatatagtcattaacttgaatttggtctgtatagtctagactttaaatttaaagttttctacaaggggagaaaagtgttaaaatttttaaaatatgttttccaggacacttcacttccaagtcaggtaggtagttcaatctagttgttagccaaggactcaaggactgaattgttttaacataaggcttttcctgttctgggagccgcacttcattaaaattcttctaaaacttgtatgtttagagttaagcaagactttttttcttcctctccatgagttgtgaaatttaatgcacaacgctgatgtggctaacaagtttattttaagaattgtttagaaatgctgttgcttcaggttcttaaaatcactcagcactccaacttctaatcaaatttttggagacttaacagcatttgtctgtgtttgaactataaaaagcaccggatcttttccatctaattccgcaaaaattgatcatttgcaaagtcaaaactatagccatatccaaatcttttccccctcccaagagttctcagtgtctacatgtagactattccttttctgtataaagttcactctaggatttcaagtcaccacttattttacattttagtcatgcaaagattcaagtagttttgcaataagtacttatctttatttgtaataatttagtctgctgatcaaaagcattgtcttaatttttgagaactggttttagcatttacaaactaaattccagttaattaattaatagctttatattgcctttcctgctacatttggttttttcccctgtccctttgattacgggctaaggtagggtagagtgggtgtagtgagtgtatataatgtgatttggccctgtgtattatgatattttgttatttttgttgttatattatttacatttcagtagttgttttttgtgtttccattttagtggataaaatttgtattttgaactatgaatggagactaccgccccagcattagtttcacatgatataccctttaaacccgaatcattgttttatttcctgattacacaggtgttgaatggggaaaggggctagtatatcagtaggatatactatgggatgtatatatatcattgctgttagagaaatgaaataaaatggggctgggctcagtggctcacgcctgtaatcccagcactttgggaggctgaggcaggtggatcacgaggtcaggagatcgagaccatcctggctaacacggtgaaaccccgtctctactaaaaaacagaaaattagccgggcgtggtggcgggcgcctgtagtcccagctactcgggaggctgaggcaggagaatggtgtgaacccgggaggcagagcttgcagtgagccgagatctcgccactgcactccagcctgggcaacagagcaagactctgtctcaaaaaaaaaaaaaaaagaaataagaaaatgggaagcaatatttgacatagttctttttagtcaaatctacttgttaaaaaaagggtagcagtttattcatctgtgaaaggaaaataatacttatcttacaaggttgcaagagctcaaggagaccatgtatgtaaagttcctgctgtaaatatgaactcccatcctaatacccttttacctctctgtgggtttgtcttgacctggaaatttgggctaaaacttagaaaaaattcttacatgataactcagtgatgcttactcatagtttttggtgtttctcatagataagatataaatcagctgggcgcggtggctcatgcctgtaatcccagcactttgggaggccgaggcgggcagatcacctgaggtcgggaggtcgagaccagcctgaccaacatggagaaaccccgtctctactaaaaatacaaaattagctgggcgtggtggctcatgcctgtaatcccagctacttgggaggctgaggcaggagaatcgcttgaacccaggaggcggaggttgtggtgagcgaagatcgtgccattgcactccagcctgggcaacaagagcaaaactctgtctcaaaaaaaaaaaaagatataaatcacaataaataaataggtcaatacaaatgttagccaggcgtggtggcacatgcccatagtcgcagctactctggaggcagaggcaggaggatcacttgagcccatgaatttgaggcagcagtgagctatgattgtgccactgtactccagtctgggtgacagagtgagaccccatctctaaataaataggtcaaacccttaaaaatatttaaattcttaaaaaattgaaaagattattcttctcaaatttagttgagctttctaagagaagcaattggctttttcccacttcaataatcattttcagtttgactcatacagttaacacaatgtgaatttcttcctcagcataacagagttatagaatgacagggctggaagtgaccttagagagtatccagttctttcattttacaggtgaggcaactgagactcaaaggtgatgtaatttgtgcaaagattatagctaattagtagcagagccctgactgggacatagtttgaaggtgaaaaacttcaccaagctacctttcttgaaaggtccaaatgtttatgttttcaactactctttccactgtaccataactttcactacatattaaatgacactttataactaatataataggacaatcatcaatgcatatatagccagcccttcatatctgtgggttttgcatccatggattcaaccaaggaggaattgaaaacactgagaaaaaaaaaaaagaccacacaataaaaaaaaaaaatacaaaataatacaaagaaaaagccaaaattgtcatactgttgttaagcaacagtataacaactatttacatagcattaaggttggtgcaaaaatgcaaaaaaaaaaaaagcaattatttttaaaccaacctaatatattgtattaggtattaaagtcatctggacatgaattaaagtatatgatgccagcctggacaaaaggcaaaaccctgtctctacaaaaaatacaaaaattagctgggcatggtggtgtgtgcctgtagtcctggctactccggagcctgaggtgggaggatcgcttgagtctgggaggcagaggctgcattgagctatgatcatggcactgcattccagcctgggtgacagtgcaagaccttgtctcagaataaataaagtatgtgatgaagatgtgcatacattatatgcaaatactgttttttttttttttaatttaaacagtctcactgtgttgcccaggatggagtgcaatggcacaatcttggctcatggcaaactctgcctcgcaagcagctgggactacaggcatgctccacggtgcccagttaattttttttgtattcttagtagagacagggtttcaccatgttggccaggctagtcttgaatttctgacctcaagtgattcatctcccaaagtgctgggattacaggcgtgagccaccacggccggctaatttttgtattttttagtagtgactggtttcgcggtgttgaccaggctggtctcgaactcctgatctcaggtgatctgcctgcctcggcctcacaaagtgctgggattacaggtgtgaaccactgctcccggccttgtgtgattttatctaagggacttaagcgtcctcaggtcctagggggtcgtgaaaccaaaaccccagggatagcaagggacaattgtatcttcaaagtagacaaatggcgccgggcacggtggctcacgcctgtaatcccagcagtttccgaggctgaggcaggcggctcacctgaggtcaggagttggagaccagcctggccaacatgctgaaaccctgtctgtacaaaaatacaaaaatagctgggcatggtggcgcatgcctgtagtcccagctactagagcgactgaggcaggagaattgcttgaacctgggaggcggaggttgcagggagccaagatggcgccaccgcactccagcctaggtgatagagtgagactccctctcaaaaacaaaacaaaacaaaaaaattagacaaatgctacattaatgtttgggtggtcagattctactttgaatctgaagtttgcagatatgcctatagatttttggagtttaccactttcttattctgtatcattaatgtaatattttaaattactatatatgttaccatttttctggatttagtaagaaatttgcagttttggtttgatgtaacaagggttttaatgtaatttatgttagattttgcatttttttcattactgttatattttaacctgactgactgatctaattgtattagtattgtgaataatcatgtgaaatgttttgagacagagtactatatttgtgaatataattttatggtttttttcacttagaacctttctgtgtggaaaactaagaaaattgctttctgctgtataatctggcattcattgtagattaaagcttatttttctgtgaataaaacgtattcaataaaatactattctttaaaattatatcataaaaaaaaaa

SEQ ID NO: 118 - RNA, 5396 nt, Homo sapiens
  source 1..5396: mol_type = mRNA
gccgccgccagggaaaagaaagggaggaaggaaggaacaagaaaaggaaataaagagaaaggggaggcggggaaaggcaacgagctgtccggcctccgtcaagggagttggagggaaaaagttctcaggcgccgcaggtccgagtgcctcgcagcccctcccgaggcgcagccgccagaccagtggagccggggcgcagggcgggggcggaggcgccggggcgggggatgcggggccgcggcgcagccccccggccctgagagcgaggacagcgccgcccggcccgcagccgtcgccgcttctccacctcggcccgtggagccggggcgtccgggcgtagccctcgctcgcctgggtcagggggtgcgcgtcgggggaggcagaagccatggatcccgggcagcagccgccgcctcaaccggccccccagggccaagggcagccgccttcgcagcccccgcaggggcagggcccgccgtccggacccgggcaaccggcacccgcggcgacccaggcggcgccgcaggcaccccccgccgggcatcagatcgtgcacgtccgcggggactcggagaccgacctggaggcgctcttcaacgccgtcatgaaccccaagacggccaacgtgccccagaccgtgcccatgaggctccggaagctgcccgactccttcttcaagccgccggagcccaaatcccactcccgacaggccagtactgatgcaggcactgcaggagccctgactccacagcatgttcgagctcattcctctccagcttctctgcagttgggagctgtttctcctgggacactgacccccactggagtagtctctggcccagcagctacacccacagctcagcatcttcgacagtcttcttttgagatacctgatgatgtacctctgccagcaggttgggagatggcaaagacatcttctggtcagagatacttcttaaatcacatcgatcagacaacaacatggcaggaccccaggaaggccatgctgtcccagatgaacgtcacagcccccaccagtccaccagtgcagcagaatatgatgaactcggcttcaggtcctcttcctgatggatgggaacaagccatgactcaggatggagaaatttactatataaaccataagaacaagaccacctcttggctagacccaaggcttgaccctcgttttgccatgaaccagagaatcagtcagagtgctccagtgaaacagccaccacccctggctccccagagcccacagggaggcgtcatgggtggcagcaactccaaccagcagcaacagatgcgactgcagcaactgcagatggagaaggagaggctgcggctgaaacagcaagaactgcttcggcaggcaatgcggaatatcaatcccagcacagcaaattctccaaaatgtcaggagttagccctgcgtagccagttaccaacactggagcaggatggtgggactcaaaatccagtgtcttctcccgggatgtctcaggaattgagaacaatgacgaccaatagctcagatcctttccttaacagtggcacctatcactctcgagatgagagtacagacagtggactaagcatgagcagctacagtgtccctcgaaccccagatgacttcctgaacagtgtggatgagatggatacaggtgatactatcaaccaaagcaccctgccctcacagcagaaccgtttcccagactaccttgaagccattcctgggacaaatgtggaccttggaacactggaaggagatggaatgaacatagaaggagaggagctgatgccaagtctgcaggaagctttgagttctgacatccttaatgacatggagtctgttttggctgccaccaagctagataaagaaagctttcttacatggttatagagccctcaggcagactgaattctaaatctgtgaaggatctaaggagacacatgcaccggaaatttccataagccagttgcagttttcaggctaatacagaaaaagatgaacaaacgtccagcaagatactttaatcctctattttgctcttccttgtccattgctgctgttaatgtattgctgacctctttcacagttggctctaaagaatcaaaagaaaaaaactttttatttcttttgctattaaaactactgttcattttgggggctgggggaagtgagcctgtttggatgatggatgccattccttttgcccagttaaatgttcaccaatcattttaactaaatactcagacttagaagtcagatgcttcatgtcacagcatttagtttgttcaacagttgtttcttcagcttcctttgtccagtggaaaaacatgatttactggtctgacaagccaaaaatgttatatctgatattaaatacttaatgctgatttgaagagatagctgaaaccaaggctgaagactgttttactttcagtattttcttttcctcctagtgctatcattagtcacataatgaccttgattttattttaggagcttataaggcatgagacaatttccatataaatatattaattattgccacatactctaatatagattttggtggataattttgtgggtgtgcattttgttctgttttgttgggttttttgttttttttgtttttggcagggtcggtgggggggttggttggttggttggttttgtcggaacctaggcaaatgaccatattagtgaatctgttaatagttgtagcttgggatggttattgtagttgttttggtaaaatcttcatttcctggttttttttaccaccttatttaaatctcgattatctgctctctcttttatatacatacacacacccaaacataacatttataatagtgtggtagtggaatgtatccttttttaggtttccctgctttccagttaatttttaaaatggtagcgctttgtatgcatttagaatacatgactagtagtttatatttcactggtagtttaaatctggttggggcagtctgcagatgtttgaagtagtttagtgttctagaaagagctattactgtggatagtgcctaggggagtgctccacgccctctgggcatacggtagatattatctgatgaattggaaaggagcaaaccagaaatggctttattttctcccttggactaatttttaagtctcgattggaattcagtgagtaggttcataatgtgcatgacagaaataagctttatagtggtttaccttcatttagctttggaagttttctttgccttagttttggaagtaaattctagtttgtagttctcatttgtaatgaacacattaacgactagattaaaatattgccttcaagattgttcttacttacaagacttgctcctacttctatgctgaaaattgaccctggatagaatactataaggttttgagttagctggaaaagtgatcagattaataaatgtatattggtagttgaatttagcaaagaaatagagataatcatgattatacctttatttttacaggaagagatgatgtaactagagtatgtgtctacaggagtaataatggtttccaaagagtattttttaaaggaacaaaacgagcatgaattaactcttcaatataagctatgaagtaatagttggttgtgaattaaagtggcaccagctagcacctctgtgttttaagggtctttcaatgtttctagaataagcccttattttcaagggttcataacaggcataaaatctcttctcctggcaaaagctgctatgaaaagcctcagcttgggaagatagatttttttccccccaattacaaaatctaagtattttggcccttcaatttggaggagggcaaaagttggaagtaagaagttttattttaagtactttcagtgctcaaaaaaatgcaatcactgtgttgtatataatagttcataggttgatcactcataataattgactctaaggcttttattaagaaaacagcagaaagattaaatcttgaattaagtctggggggaaatggccactgcagatggagttttagagtagtaatgaaattctacctagaatgcaaaattgggtatatgaattacatagcatgttgttgggattttttttaatgtgcagaagatcaaagctacttggaaggagtgcctataatttgccagtagccacagattaagattatatcttatatatcagcagattagctttagcttagggggagggtgggaaagtttggggggggggttgtgaagatttagggggaccttgatagagaactttataaacttctttctctttaataaagacttgtcttacaccgtgctgccattaaaggcagctgttctagagtttcagtcacctaagtacacccacaaaacaatatgaatatggagatcttcctttacccctcaactttaatttgcccagttatacctcagtgttgtagcagtactgtgatacctggcacagtgctttgatcttacgatgccctctgtactgacctgaaggagacctaagagtcctttccctttttgagtttgaatcatagccttgatgtggtctcttgttttatgtccttgttcctaatgtaaaagtgcttaactgcttcttggttgtattgggtagcattgggataagattttaactgggtattcttgaattgcttttacaataaaccaattttataatctttaaatttatcaactttttacatttgtgttattttcagtcagggcttcttagatctacttatggttgatggagcacattgatttggagtttcagatcttccaaagcactatttgttgtaataacttttctaaatgtagtgcctttaaaggaaaaatgaacacagggaagtgactttgctacaaataatgttgctgtgttaagtattcatattaaatacatgccttctatatggaacatggcagaaagactgaaaaataacagtaattaattgtgtaattcagaattcataccaatcagtgttgaaactcaaacattgcaaaagtgggtggcaatattcagtgcttaacacttttctagcgttggtacatctgagaaatgagtgctcaggtggattttatcctcgcaagcatgttgttataagaattgtgggtgtgcctatcataacaattgttttctgtatcttgaaaaagtattctccacattttaaatgttttatattagagaattctttaatgcacacttgtcaaatatatatatatagtaccaatgttacctttttattttttgttttagatgtaagagcatgctcatatgttaggtacttacataaattgttacattattttttcttatgtaatacctttttgtttgtttatgtggttcaaatatattctttccttaaactcttaaaaaaaaaa

SEQ ID NO: 119 - RNA, 22 nt, Homo sapiens
  source 1..22: mol_type = genomic RNA
tgaggtagtaggttgtatagtt

SEQ ID NO: 120 - RNA, 22 nt, Homo sapiens
  source 1..22: mol_type = genomic RNA
tttggtccccttcaaccagcta

SEQ ID NO: 121 - RNA, 22 nt, Homo sapiens
  source 1..22: mol_type = genomic RNA
tggagtgtgacaatggtgtttg

SEQ ID NO: 122 - RNA, 23 nt, Homo sapiens
  source 1..23: mol_type = genomic RNA
tcaagagcaataacgaaaaatgt

SEQ ID NO: 123 - RNA, 22 nt, Homo sapiens
  source 1..22: mol_type = genomic RNA
taggtagtttcatgttgttggg

SEQ ID NO: 124 - RNA, 21 nt, Homo sapiens
  source 1..21: mol_type = genomic RNA
cataaagtagaaagcactact

SEQ ID NO: 125 - RNA, 23 nt, Homo sapiens
  source 1..23: mol_type = genomic RNA
tttggcactagcacatttttgct

SEQ ID NO: 126 - RNA, 22 nt, Homo sapiens
  source 1..22: mol_type = genomic RNA
tggacggagaactgataagggt

SEQ ID NO: 127 - RNA, 22 nt, Homo sapiens
  source 1..22: mol_type = genomic RNA
acagcaggcacagacaggcagt

SEQ ID NO: 128 - RNA, 22 nt, Homo sapiens
  source 1..22: mol_type = genomic RNA
tagcagcacataatggtttgtg

SEQ ID NO: 129 - RNA, 22 nt, Homo sapiens
  source 1..22: mol_type = genomic RNA
tgaggtagtaggttgtgtggtt

SEQ ID NO: 130 - RNA, 22 nt, Homo sapiens
  source 1..22: mol_type = genomic RNA
tccttcattccaccggagtctg

SEQ ID NO: 131 - RNA, 23 nt, Homo sapiens
  source 1..23: mol_type = genomic RNA
aacattcaacgctgtcggtgagt

SEQ ID NO: 132 - RNA, 22 nt, Homo sapiens
  source 1..22: mol_type = genomic RNA
cagtggttttaccctatggtag

SEQ ID NO: 133 - RNA, 22 nt, Homo sapiens
  source 1..22: mol_type = genomic RNA
tgagaactgaattccataggct

SEQ ID NO: 134 - RNA, 23 nt, Homo sapiens
  source 1..23: mol_type = genomic RNA
aggcagtgtagttagctgattgc

SEQ ID NO: 135 - RNA, 22 nt, Homo sapiens
  source 1..22: mol_type = genomic RNA
tgtgactggttgaccagagggg

SEQ ID NO: 136 - RNA, 22 nt, Homo sapiens
  source 1..22: mol_type = genomic RNA
tgaggtagtagtttgtacagtt

SEQ ID NO: 137 - RNA, 22 nt, Homo sapiens
  source 1..22: mol_type = genomic RNA
tgaggtagtaggttgtatggtt

SEQ ID NO: 138 - RNA, 21 nt, Homo sapiens
  source 1..21: mol_type = genomic RNA
ttgtgcttgatctaaccatgt

SEQ ID NO: 139 - RNA, 22 nt, Homo sapiens
  source 1..22: mol_type = genomic RNA
tggaatgtaaggaagtgtgtgg

SEQ ID NO: 140 - RNA, 20 nt, Homo sapiens
  source 1..20: mol_type = genomic RNA
taaggcacgcggtgaatgcc

SEQ ID NO: 141 - RNA, 22 nt, Homo sapiens
  source 1..22: mol_type = genomic RNA
aacccgtagatccgaacttgtg

SEQ ID NO: 142 - RNA, 23 nt, Homo sapiens
  source 1..23: mol_type = genomic RNA
taccctgtagaaccgaatttgtg

SEQ ID NO: 143 - RNA, 23 nt, Homo sapiens
  source 1..23: mol_type = genomic RNA
ttaatgctaatcgtgataggggt

SEQ ID NO: 144 - RNA, 22 nt, Homo sapiens
  source 1..22: mol_type = genomic RNA
tggaatgtaaagaagtatgtat

SEQ ID NO: 145 - RNA, 22 nt, Homo sapiens
  source 1..22: mol_type = genomic RNA
tctcccaacccttgtaccagtg

SEQ ID NO: 146 - RNA, 22 nt, Homo sapiens
  source 1..22: mol_type = genomic RNA
tgaggtagtagtttgtgctgtt

SEQ ID NO: 147 - RNA, 21 nt, Homo sapiens
  source 1..21: mol_type = genomic RNA
ttcacagtggctaagttctgc

SEQ ID NO: 148 - RNA, 22 nt, Homo sapiens
  source 1..22: mol_type = genomic RNA
ctgaagctcagagggctctgat

SEQ ID NO: 149 - RNA, 23 nt, Homo sapiens
  source 1..23: mol_type = genomic RNA
caacggaatcccaaaagcagctg

SEQ ID NO: 150 - RNA, 22 nt, Homo sapiens
  source 1..22: mol_type = genomic RNA
tgaggtagtagattgtatagtt

SEQ ID NO: 151 - RNA, 23 nt, Homo sapiens
  source 1..23: mol_type = genomic RNA
taccctgtagatccgaatttgtg

SEQ ID NO: 152 - RNA, 22 nt, Homo sapiens
  source 1..22: mol_type = genomic RNA
tagcagcacatcatggtttaca

SEQ ID NO: 153 - RNA, 22 nt, Homo sapiens
  source 1..22: mol_type = genomic RNA
tagcagcacgtaaatattggcg

SEQ ID NO: 154 - RNA, 22 nt, Homo sapiens
  source 1..22: mol_type = genomic RNA
tggcagtgtcttagctggttgt

SEQ ID NO: 155 - RNA, 20 nt, Homo sapiens
  source 1..20: mol_type = genomic RNA
tacagtatagatgatgtact

SEQ ID NO: 156 - RNA, 21 nt, Homo sapiens
  source 1..21: mol_type = genomic RNA
tcacagtgaaccggtctcttt

SEQ ID NO: 157 - RNA, 21 nt, Homo sapiens
  source 1..21: mol_type = genomic RNA
atgacctatgaattgacagac

SEQ ID NO: 158 - RNA, 22 nt, Homo sapiens
  source 1..22: mol_type = genomic RNA
tgggtctttgcgggcgagatga

SEQ ID NO: 159 - RNA, 21 nt, Homo sapiens
  source 1..21: mol_type = genomic RNA
atcacattgccagggattacc

SEQ ID NO: 160 - RNA, 22 nt, Homo sapiens
  source 1..22: mol_type = genomic RNA
gtgaaatgtttaggaccactag

SEQ ID NO: 161 - RNA, 23 nt, Homo sapiens
  source 1..23: mol_type = genomic RNA
tgtaaacatcctacactctcagc

SEQ ID NO: 162 - RNA, 22 nt, Homo sapiens
  source 1..22: mol_type = genomic RNA
tgaggtagtaggttgtatggtt

SEQ ID NO: 163 - RNA, 22 nt, Homo sapiens
  source 1..22: mol_type = genomic RNA
tgagaactgaattccatgggtt

SEQ ID NO: 164 - RNA, 22 nt, Homo sapiens
  source 1..22: mol_type = genomic RNA
agaggtagtaggttgcatagtt

SEQ ID NO: 165 - RNA, 23 nt, Homo sapiens
  source 1..23: mol_type = genomic RNA
tctttggttatctagctgtatga

SEQ ID NO: 166 - RNA, 23 nt, Homo sapiens
  source 1..23: mol_type = genomic RNA
aacattcattgctgtcggtgggt

SEQ ID NO: 167 - RNA, 22 nt, Homo sapiens
  source 1..22: mol_type = genomic RNA
aacattcaacctgtcggtgagt

SEQ ID NO: 168 - RNA, 23 nt, Homo sapiens
  source 1..23: mol_type = genomic RNA
caaagtgctcatagtgcaggtag

SEQ ID NO: 169 - RNA, 24 nt, Homo sapiens
  source 1..24: mol_type = genomic RNA
tccctgagaccctttaacctgtga

SEQ ID NO: 170 - RNA, 22 nt, Homo sapiens
  source 1..22: mol_type = genomic RNA
tcagtgcatcacagaactttgt

SEQ ID NO: 171 - RNA, 22 nt, Homo sapiens
  source 1..22: mol_type = genomic RNA
tattgcacttgtcccggcctgt

SEQ ID NO: 172 - RNA, 21 nt, Homo sapiens
  source 1..21: mol_type = genomic RNA
actggacttggagtcagaagg

SEQ ID NO: 173 - RNA, 22 nt, Homo sapiens
  source 1..22: mol_type = genomic RNA
cagtgcaatgttaaaagggcat

SEQ ID NO: 174 - RNA, 23 nt, Homo sapiens
  source 1..23: mol_type = genomic RNA
taaagtgcttatagtgcaggtag

SEQ ID NO: 175 - RNA, 22 nt, Homo sapiens
  source 1..22: mol_type = genomic RNA
taacagtctacagccatggtcg

SEQ ID NO: 176 - RNA, 22 nt, Homo sapiens
  source 1..22: mol_type = genomic RNA
aactggccctcaaagtcccgct

SEQ ID NO: 177 - RNA, 22 nt, Homo sapiens
  source 1..22: mol_type = genomic RNA
tatggcactggtagaattcact

SEQ ID NO: 178 - RNA, 22 nt, Homo sapiens
  source 1..22: mol_type = genomic RNA
tcagtgcactacagaactttgt

SEQ ID NO: 179 - RNA, 23 nt, Homo sapiens
  source 1..23: mol_type = genomic RNA
agctggtgttgtgaatcaggccg

SEQ ID NO: 180 - RNA, 23 nt, Homo sapiens
  source 1..23: mol_type = genomic RNA
gaagtgcttcgattttggggtgt

SEQ ID NO: 181 - RNA, 23 nt, Homo sapiens
  source 1..23: mol_type = genomic RNA
tagcaccatttgaaatcagtgtt

SEQ ID NO: 182 - RNA, 23 nt, Homo sapiens
  source 1..23: mol_type = genomic RNA
tatggcttttcattcctatgtga

SEQ ID NO: 183 - RNA, 22 nt, Homo sapiens
  source 1..22: mol_type = genomic RNA
tagcttatcagactgatgttga

SEQ ID NO: 184 - RNA, 23 nt, Homo sapiens
  source 1..23: mol_type = genomic RNA
aacattcattgttgtcggtgggt

SEQ ID NO: 185 - RNA, 23 nt, Homo sapiens
  source 1..23: mol_type = genomic RNA
cagtgcaatagtattgtcaaagc

SEQ ID NO: 186 - RNA, 23 nt, Homo sapiens
  source 1..23: mol_type = genomic RNA
taatactgccgggtaatgatgga

SEQ ID NO: 187 - RNA, 23 nt, Homo sapiens
  source 1..23: mol_type = genomic RNA
tggaagactagtgattttgttgt

SEQ ID NO: 188 - RNA, 22 nt, Homo sapiens
  source 1..22: mol_type = genomic RNA
tagcaccatctgaaatcggtta

SEQ ID NO: 189 - RNA, 22 nt, Homo sapiens
  source 1..22: mol_type = genomic RNA
ctgtgcgtgtgacagcggctga

SEQ ID NO: 190 - RNA, 23 nt, Homo sapiens
  source 1..23: mol_type = genomic RNA
caaagtgcttacagtgcaggtag

SEQ ID NO: 191 - RNA, 22 nt, Homo sapiens
  source 1..22: mol_type = genomic RNA
tgaggtagtaagttgtattgtt

SEQ ID NO: 192 - RNA, 22 nt, Homo sapiens
  source 1..22: mol_type = genomic RNA
cattgcacttgtctcggtctga

SEQ ID NO: 193 - RNA, 21 nt, Homo sapiens
  source 1..21: mol_type = genomic RNA
tgagatgaagcactgtagctc

SEQ ID NO: 194 - RNA, 23 nt, Homo sapiens
  source 1..23: mol_type = genomic RNA
tgtgcaaatctatgcaaaactga

SEQ ID NO: 195 - RNA, 23 nt, Homo sapiens
  source 1..23: mol_type = genomic RNA
taaggtgcatctagtgcagatag

SEQ ID NO: 196 - RNA, 22 nt, Homo sapiens
  source 1..22: mol_type = genomic RNA
tccctgagaccctaacttgtga

SEQ ID NO: 197 - RNA, 22 nt, Homo sapiens
  source 1..22: mol_type = genomic RNA
tcgtaccgtgagtaataatgcg

SEQ ID NO: 198 - RNA, 21 nt, Homo sapiens
  source 1..21: mol_type = genomic RNA
ttcacagtggctaagttccgc

SEQ ID NO: 199 - RNA, 23 nt, Homo sapiens
  source 1..23: mol_type = genomic RNA
aaagtgctgcgacatttgagcgt

SEQ ID NO: 200 - RNA, 23 nt, Homo sapiens
  source 1..23: mol_type = genomic RNA
tctggctccgtgtcttcactccc

SEQ ID NO: 201 - RNA, 22 nt, Homo sapiens
  source 1..22: mol_type = genomic RNA
tattgcacattactaagttgca

SEQ ID NO: 202 - RNA, 2591 nt, Homo sapiens
  source 1..2591: mol_type = mRNA
cggaggtgcgcgggcgcgggcgagcagggtctccgggtgggcggcggcgacgccccgcgcaggctggaggccgccgaggctcgccatgccgggagaactctaactcccccatggagtcggccgacttctacgaggcggagccgcggcccccgatgagcagccacctgcagagccccccgcacgcgcccagcagcgccgccttcggctttccccggggcgcgggccccgcgcagcctcccgccccacctgccgccccggagccgctgggcggcatctgcgagcacgagacgtccatcgacatcagcgcctacatcgacccggccgccttcaacgacgagttcctggccgacctgttccagcacagccggcagcaggagaaggccaaggcggccgtgggccccacgggcggcggcggcggcggcgactttgactacccgggcgcgcccgcgggccccggcggcgccgtcatgcccgggggagcgcacgggcccccgcccggctacggctgcgcggccgccggctacctggacggcaggctggagcccctgtacgagcgcgtcggggcgccggcgctgcggccgctggtgatcaagcaggagccccgcgaggaggatgaagccaagcagctggcgctggccggcctcttcccttaccagccgccgccgccgccgccgccctcgcacccgcacccgcacccgccgcccgcgcacctggccgccccgcacctgcagttccagatcgcgcactgcggccagaccaccatgcacctgcagcccggtcaccccacgccgccgcccacgcccgtgcccagcccgcaccccgcgcccgcgctcggtgccgccggcctgccgggccctggcagcgcgctcaaggggctgggcgccgcgcaccccgacctccgcgcgagtggcggcagcggcgcgggcaaggccaagaagtcggtggacaagaacagcaacgagtaccgggtgcggcgcgagcgcaacaacatcgcggtgcgcaagagccgcgacaaggccaagcagcgcaacgtggagacgcagcagaaggtgctggagctgaccagtgacaatgaccgcctgcgcaagcgggtggaacagctgagccgcgaactggacacgctgcggggcatcttccgccagctgccagagagctccttggtcaaggccatgggcaactgcgcgtgaggcgcgcggctgtgggaccgccctgggccagcctccggcggggacccagggagtggtttggggtcgccggatctcgaggcttgcccgagccgtgcgagccaggactaggagattccggtgcctcctgaaagcctggcctgctccgcgtgtcccctcccttcctctgcgccggacttggtgcgtctaagatgagggggccaggcggtggcttctccctgcgaggaggggagaattcttggggctgagctgggagcccggcaactctagtatttaggataaccttgtgccttggaaatgcaaactcaccgctccaatgcctactgagtagggggagcaaatcgtgccttgtcattttatttggaggtttcctgcctccttcccgaggctacagcagacccccatgagagaaggaggggagcaggcccgtggcaggaggagggctcagggagctgagatcccgacaagcccgccagccccagccgctcctccacgcctgtccttagaaaggggtggaaacatagggacttggggcttggaacctaaggttgttcccctagttctacatgaaggtggagggtctctagttccacgcctctcccacctccctccgcacacaccccaccccagcctgctataggctgggcttccccttggggcggaactcactgcgatgggggtcaccaggtgaccagtgggagcccccaccccgagtcacaccagaaagctaggtcgtgggtcagctctgaggatgtatacccctggtgggagagggagacctagagatctggctgtggggcgggcatggggggtgaagggccactgggaccctcagccttgtttgtactgtatgccttcagcattgcctaggaacacgaagcacgatcagtccatcccagagggaccggagttatgacaagctttccaaatattttgctttatcagccgatatcaacacttgtatctggcctctgtgccccagcagtgccttgtgcaatgtgaatgtgcgcgtctctgctaaaccaccattttatttggtttttgttttgttttggttttgctcggatacttgccaaaatgagactctccgtcggcagctgggggaagggtctgagactccctttccttttggttttgggattacttttgatcctgggggaccaatgaggtgaggggggttctcctttgccctcagctttccccagcccctccggcctgggctgcccacaaggcttgtcccccagaggccctggctcctggtcgggaagggaggtggcctcccgccaacgcatcactggggctgggagcagggaaggacggcttggttctcttcttttggggagaacgtagagtctcactctagatgttttatgtattatatctataatataaacatatcaaagtcaa

SEQ ID NO: 203 - RNA, 2113 nt, Homo sapiens
  source 1..2113: mol_type = mRNA
tcccaatcccggggcggccgggcgggggtgggcagggggcgtgaggccgcccctgcgtcccgggggccccccgaaaacgcgctccgggtgcccggtccctccgctgcgccctgccgccgtcctcccgggggtctcgggcggccgcggccgtgtccttcgcgtcccggcggcgcggcgggaggggccggcgtgacgcagcggttgctacgggccgcccttataaataaccgggctcaggagaaactttagcgagtcagagccgcgcacgggactgggaaggggacccacccgagggtccagccaccagccccctcactaatagcggccaccccggcagcggcggcagcagcagcagcgacgcagcggcgacagctcagagcagggaggccgcgccacctgcgggccggccggagcgggcagccccaggccccctccccgggcacccgcgttcatgcaacgcctggtggcctgggacccagcatgtctccccctgccgccgccgccgcctgcctttaaatccatggaagtggccaacttctactacgaggcggactgcttggctgctgcgtacggcggcaaggcggcccccgcggcgccccccgcggccagacccgggccgcgcccccccgccggcgagctgggcagcatcggcgaccacgagcgcgccatcgacttcagcccgtacctggagccgctgggcgcgccgcaggccccggcgcccgccacggccacggacaccttcgaggcggctccgcccgcgcccgcccccgcgcccgcctcctccgggcagcaccacgacttcctctccgacctcttctccgacgactacgggggcaagaactgcaagaagccggccgagtacggctacgtgagcctggggcgcctgggggccgccaagggcgcgctgcaccccggctgcttcgcgcccctgcacccaccgcccccgccgccgccgccgcccgccgagctcaaggcggagccgggcttcgagcccgcggactgcaagcggaaggaggaggccggggcgccgggcggcggcgcaggcatggcggcgggcttcccgtacgcgctgcgcgcttacctcggctaccaggcggtgccgagcggcagcagcgggagcctctccacgtcctcctcgtccagcccgcccggcacgccgagccccgctgacgccaaggcgcccccgaccgcctgctacgcgggggccgcgccggcgccctcgcaggtcaagagcaaggccaagaagaccgtggacaagcacagcgacgagtacaagatccggcgcgagcgcaacaacatcgccgtgcgcaagagccgcgacaaggccaagatgcgcaacctggagacgcagcacaaggtcctggagctcacggccgagaacgagcggctgcagaagaaggtggagcagctgtcgcgcgagctcagcaccctgcggaacttgttcaagcagctgcccgagcccctgctcgcctcctccggccactgctagcgcggcccccgcgcgcgtccccctgccggccggggctgagactccggggagcgcccgcgcccgcgccctcgcccccgcccccggcggcgccggcaaaactttggcactggggcacttggcagcgcggggagcccgtcggtaattttaatattttattatatatatatatctatatttttgtccaaaccaaccgcacatgcagatggggctcccgcccgtggtgttatttaaagaagaaacgtctatgtgtacagatgaatgataaactctctgcttctccctctgcccctctccaggcgccggcgggcgggccggtttcgaagttgatgcaatcggtttaaacatggctgaacgcgtgtgtacacgggactgacgcaacccacgtgtaactgtcagccgggccctgagtaatcgcttaaagatgttcctacgggcttgttgctgttgatgttttgttttgttttgttttttggtctttttttgtattataaaaaataatctatttctatgagaaaagaggcgtctgtatattttgggaatcttttccgtttcaagcattaagaacacttttaataaacttttttttgagaatggttacaaagccttttgggggcagtaaaaaaa

SEQ ID NO: 204 - RNA, 1269 nt, Homo sapiens
  source 1..1269: mol_type = mRNA
aggtgacagcctcgcttggacgcagagcccggcccgacgccgccatgagcgccgcgctcttcagcctggacggcccggcgcgcggcgcgccctggcctgcggagcctgcgcccttctacgaaccgggccgggcgggcaagccgggccgcggggccgagccaggggccctaggcgagccaggcgccgccgcccccgccatgtacgacgacgagagcgccatcgacttcagcgcctacatcgactccatggccgccgtgcccaccctggagctgtgccacgacgagctcttcgccgacctcttcaacagcaatcacaaggcgggcggcgcggggcccctggagcttcttcccggcggccccgcgcgccccttgggcccgggccctgccgctccccgcctgctcaagcgcgagcccgactggggcgacggcgacgcgcccggctcgctgttgcccgcgcaggtggccgcgtgcgcacagaccgtggtgagcttggcggccgcagggcagcccaccccgcccacgtcgccggagccgccgcgcagcagccccaggcagacccccgcgcccggccccgcccgggagaagagcgccggcaagaggggcccggaccgcggcagccccgagtaccggcagcggcgcgagcgcaacaacatcgccgtgcgcaagagccgcgacaaggccaagcggcgcaaccaggagatgcagcagaagttggtggagctgtcggctgagaacgagaagctgcaccagcgcgtggagcagctcacgcgggacctggccggcctccggcagttcttcaagcagctgcccagcccgcccttcctgccggccgccgggacagcagactgccggtaacgcgcggccggggcgggagagactcagcaacgacccatacctcagacccgacggcccggagcggagcgcgccctgccctggcgcagccagagccgccgggtgcccgctgcagtttcttgggacataggagcgcaaagaagctacagcctggacttaccaccactaaactgcgagagaagctaaacgtgtttattttcccttaaattatttttgtaatggtagctttttctacatcttactcctgttgatgcagctaaggtacatttgtaaaaagaaaaaaaaccagacttttcagacaaaccctttgtattgtagataagaggaaaagactgagcatgctcacttttttatattaatttttacagtatttgtaagaataaagcagcatttgaaatcgaaaaaaaaaaaaaaaaaa

SEQ ID NO: 205 - RNA, 3647 nt, Homo sapiens
  source 1..3647: mol_type = mRNA
cacgcaacacctacgggtcgaatagagaagaaatgaagcacttcgcaggcatagttggagggagcggagcagggccgacagccagcggaggtacatgtgaagattttttggcagcttagcgtggaaaccattgatcaccctgctctcatttctacctgttctgtgttggcaagggagagtgcccaaatgagcaagatatcgcagcaaaacagcactccaggggtgaacggaattagtgttatccatacccaggcacatgccagcggcttacagcaggttcctcagctggtgcctgctggccctgggggaggaggcaaagctgtggctcccagcaagcagagcaaaaagagttcgcccatggatcgaaacagtgacgagtatcggcaacgccgagagaggaacaacatggctgtgaaaaagagccggttgaaaagcaagcagaaagcacaagacacactgcagagagtcaatcagctcaaagaagagaatgaacggttggaagcaaaaatcaaattgctgaccaaggaattaagtgtactcaaagatttgtttcttgagcatgcacacaaccttgcagacaacgtacagtccattagcactgaaaatacgacagcagatggcgacaatgcaggacagtagacctcaccctttccagactttagagcttgtggcttgaatgttaaaggtgtgaccaccgacaccactcatgtcaatggctgaaagttgtccatttccatgactcaaagacccattggaggctattttctgggatcagcactgaagagttgattagctaaaaatgttagccttgtaattcgaatatctggttttaaatgatagaggtttttgtgggaatcaaaatcccccaaatgttaaggtatatggtaaaaaaagaaatatctgggatcccgatgttcttaataaatcctgacttcccaagaaatgcttcttttttaagttgacaaaaggaatggggaactggcaggccgcgcagaaggttcttggttttaatggataggctgaattggattaagaaaagttgaatgccacctatggtaatctatttgtgattttcttctaaattatgtattataaattcgtagagctatagaaagcaatgagtgtgtaatttggagtgattttatatatggcataaactttgttttaacataattagtactgttttcccccaaaagtacaagtttttgagtagcaatgtcaggttaagtaaagaaacttcatcacatcttataggtagtgtgtggccaattgacttaaaaaatacaaataacatttaggaagcaaatagattaaacacaaaaataaaactaaagcataggaattatgtttttgagatacctttgggcttagattggcattgttttattctaaaaacccaactcagtggtgtagagaaacttgtgtaccaaaattttagtttctgcagatgctagtgtttttttggatacaattttgacaaccaagttagtaaacaaaatatcttaacagtttgatgacacaagctactgatgagggtttggaatattaattcagaaggtagtttctcttgtgttcaaaatagctgccatggggctgttacttttaaagtcaaaattttcttctgaaggctcattttggtatttgatcttaaccaagtgattattagagaaatgtatcaactccatgccatctcccaaaataattgtctaagaaaacttgaaagtgtaaggttttaacctttaatttatttctcttaaatacatcttttgatattgttgttgtgacatttctttttctggttagtgggctttccagactttgtaccactgcttctgtttattcatttatatgcttttgtgtcccataaattatttcagaaaatgctgataaaactcaggatattgacatttttgttgagactaaaaaatggcagtcgctaaagtagggactctagagtctggcttacgtcagtgttggtagtttagattgtctttgtcaacgttttttcttctctcttttgctttcttttctttctctttttttcttagcacagttctagctcaaatttgtgtattttttgtgtgcctgggctggagatgagagactgagtcataactgatttaaaagtttgtgttatcaggtatcttatttgaacatggtcatttttggccacattgctgtttcatactaggacttgggatgatgtagccagaataaaactcaagttgcaccctccggttggtggaagattgctgaccgtgccgtttctgggcaggagaagacatcatggtgtccagcaactcagcaaagccattcttaagagtcgtgaggtccttctgaatgtaaaactggagcccaggagaagctgtcccaggagggctgttaactccctatagagccaggagacaggataggggtttctagggtccaacaccagcttaccttggagtatgaatctacccatgaaggatgagagatgttttgaaaaactagccaggacacacccacaggatcctactggctccttagcagctgattggtgttacataattaacttaattggagatgcattaggtcacttgaatgtataagcaagcacctatggtaggcgctacagacatttaaatctcttgggaattcgatgctcccatggaatttataccagttatatgaattgacttaagtatcttgaaaaagaaactttagagaaagcatcaggggtgtgtactcagtatttcaaatcagaacacaagattggaacttttggaaaaatgggttcaagctttcctattagccatggaaatgcaaagtttagcagaagcaagcaattaggcagagaacaaaaatgttaagcatggtgttgtctatcttattgaagtggttggaaatgaaagcttttaatttgatagatttatcagtataaaattagggaaaccacgtgtggggaatgaatcaatttagagcttcgggaattgtgaggtgacttttgtaacttttgttctgtgtgtgacctgtgaaccactaggatgtgatctgcccttgtgggcaggtccagcatagttaggagttaggctttagcataaatttctagctgcatctgagtctcctgggatgggtgctctttggctggttttggctgcggatggtgagatcagagcagctcttcctgctgctggcccctgcaatcagttgttgggatgccagtgcagatcactaagtagtaagattttaatcaaacacgaccaggtccgaaatgcaggtcatgagtgtgaaattctcaaatttacataaaaagtagaagtatagacagtttaacatttggtattaaaggagaggaaattgtagcagcttttcacgtttcccagtccccattagagggcttgagaccttgtacctgaacaacccattttgcactcagtgctttctgatgccttaggagaattgttttgtttcacaaaagctgggaaggaagaagtccattctgcagctgttagatctgcctctcaggaaaaagtactaacttgttctttttgttcctggctttcatcagtttgtgagatttctctattttttttaaatataattttatttctttcaacaaatataaaataaaaaacaactttggaacaatgaaaaaaaaaaaaaaa

SEQ ID NO: 206 - RNA, 3341 nt, Homo sapiens
  source 1..3341: mol_type = mRNA
tgagtttcacgcgcgtatgctttgcccgccatggccgcagtcaaggagcctttggagttccatgccaagcggccttggcgccccgaggaggcagtagaagatccggacgaggaggatgaggataatactagtgaagccgagaatgggttctccctggaggaagtgttacggctcggaggcaccaagcaagattaccttatgctggctactttggatgagaatgaggaagtgatagatggaggcaaaaaaggagcaatcgatgaccttcagcaaggtgaattggaagcatttattcaaaatcttaatttggcgaagtatacaaaagcttccttagttgaagaagatgaaccagctgaaaaagaaaattccagcaaaaaagaagtaaaaatacctaaaataaataataaaaatacagcagaaagtcaaaggacatcagttaataaggtgaaaaataagaataggccagaaccacattctgatgagaatggcagtaccacaccgaaagtaaagaaagataaacagaacatctttgaattttttgagagacagactttgttacttaggcctggaggcaaatggtatgatctggagtacagcaatgaatattctttgaaaccccagcctcaggatgttgtatctaagtacaaaacccttgctcagaagctgtatcagcatgaaatcaacttattcaaaagtaagacgaatagtcaaaagggagcctcttctacctggatgaaggcaattgtgtcatcggggacactaggtgacaggatggcagccatgattcttcttattcaggatgatgccgttcacacacttcagtttgtagaaactcttgtgaaccttgttaaaaagaagggcagcaaacagcagtgccttatggccttggatactttcaaagagttgcttatcacagaccttttgccagacaatcggaagctgaggattttcagccagcgtccttttgacaaactggaacagttgtccagtggcaacaaggactcaagagatagaagactgatattatggtattttgaacaccagctgaaacacttagtggctgaatttgtgcaggtcttagaaactttaagtcatgatacattagtaaccactaaaactcgagcccttaccgtggctcatgagctgctttgtaacaagcctgaggaagaaaaggctcttcttgtgcaagtggtaaataaactgggagatcctcagaacagaattgccacaaaagcatcccatctgttagagacattactttgtaaacatcccaatatgaaaggagttgtgtctggtgaagtagaaaggctactcttccgctcaaatatcagctccaaagctcaatattatgcaatttgctttttaaatcaaatggctctgtcccatgaagaaagtgaattggctaacaaattaataactgtttacttttgcttttttcggacttgtgtcaaaaaaaaagatgttgaatcaaaaatgcttagcgcccttttaacaggtgtgaatagggcatacccttattcccagactggtgatgacaaagtaagggagcagattgacacactgtttaaagtgttgcatattgtgaattttaataccagtgtccaggctttaatgttgcttttccaagtaatgaattctcagcagacaatatcggatcgatattacacagcattatacaggaagatgttggatccagggttgatgacgtgttccaagcaagctatgtttcttaaccttgtctacaaatctctgaaagctgacattgtgttgcgccgggtgaaggcttttgtgaagaggttacttcaagttacttgtcaacagatgccaccatttatatgtggagctttatatcttgtgtctgagatccttaaagcaaaaccaggtttaagaagccaactagatgatcatccggagtctgatgatgaagaaaattttattgatgcaaatgatgatgaagacatggaaaaattcactgatgcagacaaagaaacagagatagtgaaaaaacttgagacagaggaaacagttcctgaaactgatgtagaaaccaaaaaaccagaggttgcttcctgggtgcactttgataatttgaaaggtgggaaacagttaaataaatacgatccattcagtagaaaccctctgttctgtggagctgaaaatacaagtctttgggaactcaaaaagttatctgtgcattttcatccctccgtggccctttttgcaaagaccatccttcagggaaactatattcagtattcaggggacccactgcaggatttcactctaatgagatttttggatcgatttgtataccgaaatccaaagccccataaaggcaaagaaaacacagatagtgttgtgatgcagccgaaaagaaaacattttattaaggatattcgtcatcttcctgtgaacagtaaggagttccttgcaaaagaagaaagccaaataccagtggatgaagtgtttttccacaggtattataaaaaagttgctgttaaagagaaacaaaaacgggatgcagatgaagaaagtatagaagacgtggatgatgaagaatttgaagagctgattgacacatttgaagatgataactgtttcagctctggaaaggatgatatggattttgctggaaacgtgaaaaagagaacaaaaggagctaaggataacacattagatgaagattcagaaggtagtgatgatgaacttggtaacctggatgacgatgaagtttctttaggaagtatggatgatgaagaatttgctgaagttgatgaagatggaggaacattcatggatgtgttagatgatgaaagtgagagcgttccagaacttgaagtccactccaaagtcagtactaagaaaagcaagagaaaaggtacagatgattttgactttgctggctcatttcaagggccaagaaaaaagaaaagaaacttaaatgattccagcctatttgtatctgctgaagagtttggccatctattggatgaaaatatgggatccaagtttgataacattggcatgaatgccatggctaacaaagataatgcaagtctcaaacagcttagatgggaggctgaacgtgatgactggctacacaacagagatgcaaaaagtatcatcaagaaaaagaaacattttaaaaagaagaggattaaaaccactcaaaaaactaaaaaacaaaggaaatgagttattaatgtaaattatagattaaaattctacttacatctaatttttgctgttcaaccatgttttttgatctagctctctgattccatacattccagacttctcagtggatttgtaataaactataaataaaaaaaaaaaaaaaa

SEQ ID NO: 207 - RNA, 2108 nt, Homo sapiens
  source 1..2108: mol_type = mRNA
ctttcaattcctctggcaacaaaccacacactgggatctgacactgtagagtgctttctcttctctttttttgggggggggagggggtgtggttgcatatttaaactctcacgcatttatgtactgaggactgcagtgtaggactttcctgcagaataccatttgatcctattaagaattgtccaaatgttggagcatttgattgaaaaatccttcttagccattttaaagatagctttccaatgattagacgaattgattctttctgtgactcatcagttcatttcctgtaaaattcatgtcttgctgttgatttgtgaataagaaccagagcttgtagaaaccactttaatcatatccaggagtttgcaagaaacaggtgcttaacactaattcacctcctgaacaagaaaaatgggctgtgaccggaactgtgggctcatcgctggggctgtcattggtgctgtcctggctgtgtttggaggtattctaatgccagttggagacctgcttatccagaagacaattaaaaagcaagttgtcctcgaagaaggtacaattgcttttaaaaattgggttaaaacaggcacagaagtttacagacagttttggatctttgatgtgcaaaatccacaggaagtgatgatgaacagcagcaacattcaagttaagcaaagaggtccttatacgtacagagttcgttttctagccaaggaaaatgtaacccaggacgctgaggacaacacagtctctttcctgcagcccaatggtgccatcttcgaaccttcactatcagttggaacagaggctgacaacttcacagttctcaatctggctgtggcagctgcatcccatatctatcaaaatcaatttgttcaaatgatcctcaattcacttattaacaagtcaaaatcttctatgttccaagtcagaactttgagagaactgttatggggctatagggatccatttttgagtttggttccgtaccctgttactaccacagttggtctgttttatccttacaacaatactgcagatggagtttataaagttttcaatggaaaagataacataagtaaagttgccataatcgacacatataaaggtaaaaggaatctgtcctattgggaaagtcactgcgacatgattaatggtacagatgcagcctcatttccaccttttgttgagaaaagccaggtattgcagttcttttcttctgatatttgcaggtcaatctatgctgtatttgaatccgacgttaatctgaaaggaatccctgtgtatagatttgttcttccatccaaggcctttgcctctccagttgaaaacccagacaactattgtttctgcacagaaaaaattatctcaaaaaattgtacatcatatggtgtgctagacatcagcaaatgcaaagaagggagacctgtgtacatttcacttcctcattttctgtatgcaagtcctgatgtttcagaacctattgatggattaaacccaaatgaagaagaacataggacatacttggatattgaacctataactggattcactttacaatttgcaaaacggctgcaggtcaacctattggtcaagccatcagaaaaaattcaagtattaaagaatctgaagaggaactatattgtgcctattctttggcttaatgagactgggaccattggtgatgagaaggcaaacatgttcagaagtcaagtaactggaaaaataaacctccttggcctgatagaaatgatcttactcagtgttggtgtggtgatgtttgttgcttttatgatttcatattgtgcatgcagatcgaaaacaataaaataagtaagtatgtaccaaaaaatattgcttcaataatattagcttatatattacttgttttcactttatcaaagagaagttacatattaggccatatatatttctagacatgtctagccactgatcatttttaaatataggtaaataaacctataaatattatcacgcagatcactaaagtatatctttaattctgggagaaatgagataaaagatgtacttgtgaccattgtaacaatagcacaaataaagcacttgtgccaaagttgtccaaaaaa

SEQ ID NO: 208 - RNA, 3747 nt, Homo sapiens
  source 1..3747: mol_type = mRNA
aaatttttccgtctgccctttccccctcttctcgttggcagggttgatcctcattactgtttgctcaaacgtttagaagtgaatttaggtccctccccccaacttatgattttatagccaataggtgatgaggtttatttgcatatttccagtcacataagcagccttggcgtgaaaacagtgtcagactcgattccccctcttcctcctcctcaagggaaagctgcccacttctagctgccctgccatcccctttaaagggcgacttgctcagcgccaaaccgcggctccagccctctccagcctccggctcagccggctcatcagtcggtccgcgccttgcagctcctccagagggacgcgccccgagatggagagcaaagccctgctcgtgctgactctggccgtgtggctccagagtctgaccgcctcccgcggaggggtggccgccgccgaccaaagaagagattttatcgacatcgaaagtaaatttgccctaaggacccctgaagacacagctgaggacacttgccacctcattcccggagtagcagagtccgtggctacctgtcatttcaatcacagcagcaaaaccttcatggtgatccatggctggacggtaacaggaatgtatgagagttgggtgccaaaacttgtggccgccctgtacaagagagaaccagactccaatgtcattgtggtggactggctgtcacgggctcaggagcattacccagtgtccgcgggctacaccaaactggtgggacaggatgtggcccggtttatcaactggatggaggaggagtttaactaccctctggacaatgtccatctcttgggatacagccttggagcccatgctgctggcattgcaggaagtctgaccaataagaaagtcaacagaattactggcctcgatccagctggacctaactttgagtatgcagaagccccgagtcgtctttctcctgatgatgcagattttgtagacgtcttacacacattcaccagagggtcccctggtcgaagcattggaatccagaaaccagttgggcatgttgacatttacccgaatggaggtacttttcagccaggatgtaacattggagaagctatccgcgtgattgcagagagaggacttggagatgtggaccagctagtgaagtgctcccacgagcgctccattcatctcttcatcgactctctgttgaatgaagaaaatccaagtaaggcctacaggtgcagttccaaggaagcctttgagaaagggctctgcttgagttgtagaaagaaccgctgcaacaatctgggctatgagatcaataaagtcagagccaaaagaagcagcaaaatgtacctgaagactcgttctcagatgccctacaaagtcttccattaccaagtaaagattcatttttctgggactgagagtgaaacccataccaatcaggcctttgagatttctctgtatggcaccgtggccgagagtgagaacatcccattcactctgcctgaagtttccacaaataagacctactccttcctaatttacacagaggtagatattggagaactactcatgttgaagctcaaatggaagagtgattcatactttagctggtcagactggtggagcagtcccggcttcgccattcagaagatcagagtaaaagcaggagagactcagaaaaaggtgatcttctgttctagggagaaagtgtctcatttgcagaaaggaaaggcacctgcggtatttgtgaaatgccatgacaagtctctgaataagaagtcaggctgaaactgggcgaatctacagaacaaagaacggcatgtgaattctgtgaagaatgaagtggaggaagtaacttttacaaaacatacccagtgtttggggtgtttcaaaagtggattttcctgaatattaatcccagccctacccttgttagttattttaggagacagtctcaagcactaaaaagtggctaattcaatttatggggtatagtggccaaatagcacatcctccaacgttaaaagacagtggatcatgaaaagtgctgttttgtcctttgagaaagaaataattgtttgagcgcagagtaaaataaggctccttcatgtggcgtattgggccatagcctataattggttagaacctcctattttaattggaattctggatctttcggactgaggccttctcaaactttactctaagtctccaagaatacagaaaatgcttttccgcggcacgaatcagactcatctacacagcagtatgaatgatgttttagaatgattccctcttgctattggaatgtggtccagacgtcaaccaggaacatgtaacttggagagggacgaagaaagggtctgataaacacagaggttttaaacagtccctaccattggcctgcatcatgacaaagttacaaattcaaggagatataaaatctagatcaattaattcttaataggctttatcgtttattgcttaatccctctctcccccttcttttttgtctcaagattatattataataatgttctctgggtaggtgttgaaaatgagcctgtaatcctcagctgacacataatttgaatggtgcagaaaaaaaaaaagaaaccgtaattttattattagattctccaaatgattttcatcaatttaaaatcattcaatatctgacagttactcttcagttttaggcttaccttggtcatgcttcagttgtacttccagtgcgtctcttttgttcctggctttgacatgaaaagataggtttgagttcaaattttgcattgtgtgagcttctacagattttagacaaggaccgtttttactaagtaaaagggtggagaggttcctggggtggattcctaagcagtgcttgtaaaccatcgcgtgcaatgagccagatggagtaccatgagggttgctatttgttgtttttaacaactaatcaagagtgagtgaacaactatttataaactagatctcctatttttcagaatgctcttctacgtataaatatgaaatgataaagatgtcaaatatctcagaggctatagctgggaacccgactgtgaaagtatgtgatatctgaacacatactagaaagctctgcatgtgtgttgtccttcagcataattcggaagggaaaacagtcgatcaagggatgtattggaacatgtcggagtagaaattgttcctgatgtgccagaacttcgaccctttctctgagagagatgatcgtgcctataaatagtaggaccaatgttgtgattaacatcatcaggcttggaatgaattctctctaaaaataaaatgatgtatgatttgttgttggcatcccctttattaattcattaaatttctggatttgggttgtgacccagggtgcattaacttaaaagattcactaaagcagcacatagcactgggaactctggctccgaaaaactttgttatatatatcaaggatgttctggctttacattttatttattagctgtaaatacatgtgtggatgtgtaaatggagcttgtacatattggaaaggtcattgtggctatctgcatttataaatgtgtggtgctaactgtatgtgtctttatcagtgatggtctcacagagccaactcactcttatgaaatgggctttaacaaaacaagaaagaaacgtacttaactgtgtgaagaaatggaatcagcttttaataaaattgacaacattttattaccaca

SEQ ID NO: 209 - RNA, 1939 nt, Homo sapiens
  source 1..1939: mol_type = mRNA
aggaaggaggggtggcctgacccctcggcagtccctcccctcagcctttccccaaattgctacttctctggggctccaggtcctgcttgtgctcagctccagctcactggctggccaccgagacttctggacaggaaactgcaccatcctcttctcccagcaagggggctccagagactgcccacccaggaagtctggtggcctggggatttggacagtgccttggtaatgaccagggctccaggaagagatgtccttgtggctgggggcccctgtgcctgacattcctcctgactctgcggtggagctgtggaagccaggcgcacaggatgcaagcagccaggcccagggaggcagcagctgcatcctcagagaggaagccaggatgccccactctgctgggggtactgcaggggtggggctggaggctgcagagcccacagccctgctcaccagggcagagcccccttcagaacccacagagatccgtccacaaaagcggaaaaaggggccagcccccaaaatgctggggaacgagctatgcagcgtgtgtggggacaaggcctcgggcttccactacaatgttctgagctgcgagggctgcaagggattcttccgccgcagcgtcatcaagggagcgcactacatctgccacagtggcggccactgccccatggacacctacatgcgtcgcaagtgccaggagtgtcggcttcgcaaatgccgtcaggctggcatgcgggaggagtgtgtcctgtcagaagaacagatccgcctgaagaaactgaagcggcaagaggaggaacaggctcatgccacatccttgccccccagggcttcctcacccccccaaatcctgccccagctcagcccggaacaactgggcatgatcgagaagctcgtcgctgcccagcaacagtgtaaccggcgctccttttctgaccggcttcgagtcacgccttggcccatggcaccagatccccatagccgggaggcccgtcagcagcgctttgcccacttcactgagctggccatcgtctctgtgcaggagatagttgactttgctaaacagctacccggcttcctgcagctcagccgggaggaccagattgccctgctgaagacctctgcgatcgaggtgatgcttctggagacatctcggaggtacaaccctgggagtgagagtatcaccttcctcaaggatttcagttataaccgggaagactttgccaaagcagggctgcaagtggaattcatcaaccccatcttcgagttctccagggccatgaatgagctgcaactcaatgatgccgagtttgccttgctcattgctatcagcatcttctctgcagaccggcccaacgtgcaggaccagctccaggtagagaggctgcagcacacatatgtggaagccctgcatgcctacgtctccatccaccatccccatgaccgactgatgttcccacggatgctaatgaaactggtgagcctccggaccctgagcagcgtccactcagagcaagtgtttgcactgcgtctgcaggacaaaaagctcccaccgctgctctctgagatctgggatgtgcacgaatgactgttctgtccccatattttctgttttcttggccggatggctgaggcctggtggctgcctcctagaagtggaacagactgagaagggcaaacattcctgggagctgggcaaggagatcctcccgtggcattaaaagagagtcaaagggttgcgagttttgtggctactgagcagtggagccctcgctaacactgtgctgtgtctgaagatcatgctgaccccacaaacggatgggcctgggggccactttgcacagggttctccagagccctgcccatcctgcctccaccacttcctgtttttcccacagggccccaagaaaaattctccactgtcaaaaaaaaa

SEQ ID NO: 210 - RNA, 4922 nt, Homo sapiens
  source 1..4922: mol_type = mRNA
agcagagctgcggccgggggaacccagtttccgaggaacttttcgccggcgccgggccgcctctgaggccagggcaggacacgaacgcgcggagcggcggcggcgactgagagccggggccgcggcggcgctccctaggaagggccgtacgaggcggcgggcccggcgggcctcccggaggaggcggctgcgccatggacgagccacccttcagcgaggcggctttggagcaggcgctgggcgagccgtgcgatctggacgcggcgctgctgaccgacatcgaagacatgcttcagcttatcaacaaccaagacagtgacttccctggcctatttgacccaccctatgctgggagtggggcagggggcacagaccctgccagccccgataccagctccccaggcagcttgtctccacctcctgccacattgagctcctctcttgaagccttcctgagcgggccgcaggcagcgccctcacccctgtcccctccccagcctgcacccactccattgaagatgtacccgtccatgcccgctttctcccctgggcctggtatcaaggaagagtcagtgccactgagcatcctgcagacccccaccccacagcccctgccaggggccctcctgccacagagcttcccagccccagccccaccgcagttcagctccacccctgtgttaggctaccccagccctccgggaggcttctctacaggaagccctcccgggaacacccagcagccgctgcctggcctgccactggcttccccgccaggggtcccgcccgtctccttgcacacccaggtccagagtgtggtcccccagcagctactgacagtcacagctgcccccacggcagcccctgtaacgaccactgtgacctcgcagatccagcaggtcccggtcctgctgcagccccacttcatcaaggcagactcgctgcttctgacagccatgaagacagacggagccactgtgaaggcggcaggtctcagtcccctggtctctggcaccactgtgcagacagggcctttgccgaccctggtgagtggcggaaccatcttggcaacagtcccactggtcgtagatgcggagaagctgcctatcaaccggctcgcagctggcagcaaggccccggcctctgcccagagccgtggagagaagcgcacagcccacaacgccattgagaagcgctaccgctcctccatcaatgacaaaatcattgagctcaaggatctggtggtgggcactgaggcaaagctgaataaatctgctgtcttgcgcaaggccatcgactacattcgctttctgcaacacagcaaccagaaactcaagcaggagaacctaagtctgcgcactgctgtccacaaaagcaaatctctgaaggatctggtgtcggcctgtggcagtggagggaacacagacgtgctcatggagggcgtgaagactgaggtggaggacacactgaccccacccccctcggatgctggctcacctttccagagcagccccttgtcccttggcagcaggggcagtggcagcggtggcagtggcagtgactcggagcctgacagcccagtctttgaggacagcaaggcaaagccagagcagcggccgtctctgcacagccggggcatgctggaccgctcccgcctggccctgtgcacgctcgtcttcctctgcctgtcctgcaaccccttggcctccttgctgggggcccgggggcttcccagcccctcagataccaccagcgtctaccatagccctgggcgcaacgtgctgggcaccgagagcagagatggccctggctgggcccagtggctgctgcccccagtggtctggctgctcaatgggctgttggtgctcgtctccttggtgcttctctttgtctacggtgagccagtcacacggccccactcaggccccgccgtgtacttctggaggcatcgcaagcaggctgacctggacctggcccggggagactttgcccaggctgcccagcagctgtggctggccctgcgggcactgggccggcccctgcccacctcccacctggacctggcttgtagcctcctctggaacctcatccgtcacctgctgcagcgtctctgggtgggccgctggctggcaggccgggcagggggcctgcagcaggactgtgctctgcgagtggatgctagcgccagcgcccgagacgcagccctggtctaccataagctgcaccagctgcacaccatggggaagcacacaggcgggcacctcactgccaccaacctggcgctgagtgccctgaacctggcagagtgtgcaggggatgccgtgtctgtggcgacgctggccgagatctatgtggcggctgcattgagagtgaagaccagtctcccacgggccttgcattttctgacacgcttcttcctgagcagtgcccgccaggcctgcctggcacagagtggctcagtgcctcctgccatgcagtggctctgccaccccgtgggccaccgtttcttcgtggatggggactggtccgtgctcagtaccccatgggagagcctgtacagcttggccgggaacccagtggaccccctggcccaggtgactcagctattccgggaacatctcttagagcgagcactgaactgtgtgacccagcccaaccccagccctgggtcagctgatggggacaaggaattctcggatgccctcgggtacctgcagctgctgaacagctgttctgatgctgcgggggctcctgcctacagcttctccatcagttccagcatggccaccaccaccggcgtagacccggtggccaagtggtgggcctctctgacagctgtggtgatccactggctgcggcgggatgaggaggcggctgagcggctgtgcccgctggtggagcacctgccccgggtgctgcaggagtctgagagacccctgcccagggcagctctgcactccttcaaggctgcccgggccctgctgggctgtgccaaggcagagtctggtccagccagcctgaccatctgtgagaaggccagtgggtacctgcaggacagcctggctaccacaccagccagcagctccattgacaaggccgtgcagctgttcctgtgtgacctgcttcttgtggtgcgcaccagcctgtggcggcagcagcagcccccggccccggccccagcagcccagggcaccagcagcaggccccaggcttccgcccttgagctgcgtggcttccaacgggacctgagcagcctgaggcggctggcacagagcttccggcccgccatgcggagggtgttcctacatgaggccacggcccggctgatggcgggggccagccccacacggacacaccagctcctcgaccgcagtctgaggcggcgggcaggccccggtggcaaaggaggcgcggtggcggagctggagccgcggcccacgcggcgggagcacgcggaggccttgctgctggcctcctgctacctgccccccggcttcctgtcggcgcccgggcagcgcgtgggcatgctggctgaggcggcgcgcacactcgagaagcttggcgatcgccggctgctgcacgactgtcagcagatgctcatgcgcctgggcggtgggaccactgtcacttccagctagaccccgtgtccccggcctcagcacccctgtctctagccactttggtcccgtgcagcttctgtcctgcgtcgaagctttgaaggccgaaggcagtgcaagagactctggcctccacagttcgacctgcggctgctgtgtgccttcgcggtggaaggcccgaggggcgcgatcttgaccctaagaccggcggccatgatggtgctgacctctggtggccgatcggggcactgcaggggccgagccattttggggggcccccctccttgctctgcaggcaccttagtggcttttttcctcctgtgtacagggaagagaggggtacatttccctgtgctgacggaagccaacttggctttcccggactgcaagcagggctctgccccagaggcctctctctccgtcgtgggagagagacgtgtacatagtgtaggtcagcgtgcttagcctcctgacctgaggctcctgtgctactttgccttttgcaaactttattttcatagattgagaagttttgtacagagaattaaaaatgaaattatttataatctgggttttgtgtcttcagctgatggatgtgctgactagtgagagtgcttgggccctcccccagcacctagggaaaggcttcccctccccctccggccacaaggtacacaacttttaacttagctcttcccgatgtttgtttgttagtgggaggagtggggagggctggctgtatggcctccagcctacctgttccccctgctcccagggcacatggttgggctgtgtcaacccttagggcctccatggggtcagttgtcccttctcacctcccagctctgtccccatcaggtccctgggtggcacgggaggatggactgacttccaggacctgttgtgtgacaggagctacagcttgggtctccctgcaagaagtctggcacgtctcacctcccccatcccggcccctggtcatctcacagcaaagaagcctcctccctcccgacctgccgccacactggagagggggcacaggggcgggggaggtttcctgttctgtgaaaggccgactccctgactccattcatgcccccccccccagcccctcccttcattcccattccccaacctaaagcctggcccggctcccagctgaatctggtcggaatccacgggctgcagattttccaaaacaatcgttgtatctttattgacttttttttttttttttttctgaatgcaatgactgttttttactcttaaggaaaataaacatcttttagaaacaaaaaaaaaaaa

SEQ ID NO: 211 - RNA, 2465 nt, Homo sapiens
  source 1..2465: mol_type = mRNA
tgccccgttgtgaggtgataaagtgttgcgctccgggacgccagcgccgcggctgccgcctctgctggggtctaggctgtttctctcgcgccaccactggccgccggccgcagctccaggtgtcctagccgcccagcctcgacgccgtcccgggacccctgtgctctgcgcgaagccctggccccgggggccggggcatgggccaggggcgcggggtgaagcggcttcccgcggggccgtgactgggcgggcttcagccatgaagaccctcatagccgcctactccggggtcctgcgcggcgagcgtcaggccgaggctgaccggagccagcgctctcacggaggacctgcgctgtcgcgcgaggggtctgggagatggggcactggatccagcatcctctccgccctccaggacctcttctctgtcacctggctcaataggtccaaggtggaaaagcagctacaggtcatctcagtgctccagtgggtcctgtccttccttgtactgggagtggcctgcagtgccatcctcatgtacatattctgcactgattgctggctcatcgctgtgctctacttcacttggctggtgtttgactggaacacacccaagaaaggtggcaggaggtcacagtgggtccgaaactgggctgtgtggcgctactttcgagactactttcccatccagctggtgaagacacacaacctgctgaccaccaggaactatatctttggataccacccccatggtatcatgggcctgggtgccttctgcaacttcagcacagaggccacagaagtgagcaagaagttcccaggcatacggccttacctggctacactggcaggcaacttccgaatgcctgtgttgagggagtacctgatgtctggaggtatctgccctgtcagccgggacaccatagactatttgctttcaaagaatgggagtggcaatgctatcatcatcgtggtcgggggtgcggctgagtctctgagctccatgcctggcaagaatgcagtcaccctgcggaaccgcaagggctttgtgaaactggccctgcgtcatggagctgacctggttcccatctactcctttggagagaatgaagtgtacaagcaggtgatcttcgaggagggctcctggggccgatgggtccagaagaagttccagaaatacattggtttcgccccatgcatcttccatggtcgaggcctcttctcctccgacacctgggggctggtgccctactccaagcccatcaccactgttgtgggagagcccatcaccatccccaagctggagcacccaacccagcaagacatcgacctgtaccacaccatgtacatggaggccctggtgaagctcttcgacaagcacaagaccaagttcggcctcccggagactgaggtcctggaggtgaactgagccagccttcggggccaattccctggaggaaccagctgcaaatcacttttttgctctgtaaatttggaagtgtcatgggtgtctgtgggttatttaaaagaaattataacaattttgctaaaccattacaatgttaggtcttttttaagaaggaaaaagtcagtatttcaagttctttcacttccagcttgccctgttctaggtggtggctaaatctgggcctaatctgggtggctcagctaacctctcttcttcccttcctgaagtgacaaaggaaactcagtcttcttggggaagaaggattgccattagtgacttggaccagttagatgattcactttttgcccctagggatgagaggcgaaagccacttctcatacaagcccctttattgccactaccccacgctcgtctagtcctgaaactgcaggaccagtttctctgccaaggggaggagttggagagcacagttgccccgttgtgtgagggcagtagtaggcatctggaatgctccagtttgatctcccttctgccacccctacctcacccctagtcactcatatcggagcctggactggcctccaggatgaggatgggggtggcaatgacaccctgcaggggaaaggactgccccccatgcaccattgcagggaggatgccgccaccatgagctaggtggagtaactggtttttcttgggtggctgatgacatggatgcagcacagactcagccttggcctggagcacatgcttactggtggcctcagtttaccttccccagatcctagattctggatgtgaggaagagatccctcttcagaaggggcctggccttctgagcagcagattagttccaaagcaggtggcccccgaacccaagcctcacttttctgtgccttcctgagggggttgggccggggaggaaacccaaccctctcctgtgtgttctgttatctcttgatgagatcattgcaccatgtcagacttttgtatatgccttgaaaataaatgaaagtgagaatcctctaaaaaaaaaaaa

SEQ ID NO: 212 - RNA, 1717 nt, Homo sapiens
  source 1..1717: mol_type = mRNA
atatacgggctccaggctgaacggctcgggccacttacacaccactgcctgataaccatgctggctgccacagtcctgaccctggccctgctgggcaatgcccatgcctgctccaaaggcacctcgcacgaggcaggcatcgtgtgccgcatcaccaagcctgccctcctggtgttgaaccacgagactgccaaggtgatccagaccgccttccagcgagccagctacccagatatcacgggcgagaaggccatgatgctccttggccaagtcaagtatgggttgcacaacatccagatcagccacttgtccatcgccagcagccaggtggagctggtggaagccaagtccattgatgtctccattcagaacgtgtctgtggtcttcaaggggaccctgaagtatggctacaccactgcctggtggctgggtattgatcagtccattgacttcgagatcgactctgccattgacctccagatcaacacacagctgacctgtgactctggtagagtgcggaccgatgcccctgactgctacctgtctttccataagctgctcctgcatctccaaggggagcgagagcctgggtggatcaagcagctgttcacaaatttcatctccttcaccctgaagctggtcctgaagggacagatctgcaaagagatcaacgtcatctctaacatcatggccgattttgtccagacaagggctgccagcatcctttcagatggagacattggggtggacatttccctgacaggtgatcccgtcatcacagcctcctacctggagtcccatcacaagggtcatttcatctacaagaatgtctcagaggacctccccctccccaccttctcgcccacactgctgggggactcccgcatgctgtacttctggttctctgagcgagtcttccactcgctggccaaggtagctttccaggatggccgcctcatgctcagcctgatgggagacgagttcaaggcagtgctggagacctggggcttcaacaccaaccaggaaatcttccaagaggttgtcggcggcttccccagccaggcccaagtcaccgtccactgcctcaagatgcccaagatctcctgccaaaacaagggagtcgtggtcaattcttcagtgatggtgaaattcctctttccacgcccagaccagcaacattctgtagcttacacatttgaagaggatatcgtgactaccgtccaggcctcctattctaagaaaaagctcttcttaagcctcttggatttccagattacaccaaagactgtttccaacttgactgagagcagctccgagtccgtccagagcttcctgcagtcaatgatcaccgctgtgggcatccctgaggtcatgtctcggctcgaggtagtgtttacagccctcatgaacagcaaaggcgtgagcctcttcgacatcatcaaccctgagattatcactcgagatggcttcctgctgctgcagatggactttggcttccctgagcacctgctggtggatttcctccagagcttgagctagaagtctccaaggaggtcgggatggggcttgtagcagaaggcaagcaccaggctcacagctggaaccctggtgtctcctccagcgtggtggaagttgggttaggagtacggagatggagattggctcccaactcctccctatcctaaaggcccactggcattaaagtgctgtatccaag

SEQ ID NO: 213 - RNA, 8481 nt, Homo sapiens
  source 1..8481: mol_type = mRNA
gagagacggcagcggccccggcctccctctccgccgcgcttcagcctcccgctccgccgcgctccagcctcgctctccgccgcccgcaccgccgcccgcgccctcaccagagcagccatggaggaggtggtgattgccggcatgtccgggaagctgccagagtcggagaacttgcaggagttctgggacaacctcatcggcggtgtggacatggtcacggacgatgaccgtcgctggaaggcggggctctacggcctgccccggcggtccggcaagctgaaggacctgtctaggtttgatgcctccttcttcggagtccaccccaagcaggcacacacgatggaccctcagctgcggctgctgctggaagtcacctatgaagccatcgtggacggaggcatcaacccagattcactccgaggaacacacactggcgtctgggtgggcgtgagcggctctgagacctcggaggccctgagccgagaccccgagacactcgtgggctacagcatggtgggctgccagcgagcgatgatggccaaccggctctccttcttcttcgacttcagagggcccagcatcgcactggacacagcctgctcctccagcctgatggccctgcagaacgcctaccaggccatccacagcgggcagtgccctgccgccatcgtggggggcatcaatgtcctgctgaagcccaacacctccgtgcagttcttgaggctggggatgctcagccccgagggcacctgcaaggccttcgacacagcggggaatgggtactgccgctcggagggtgtggtggccgtcctgctgaccaagaagtccctggcccggcgggtgtacgccaccatcctgaacgccggcaccaatacagatggcttcaaggagcaaggcgtgaccttcccctcaggggatatccaggagcagctcatccgctcgttgtaccagtcggccggagtggcccctgagtcatttgaatacatcgaagcccacggcacaggcaccaaggtgggcgacccccaggagctgaatggcatcacccgagccctgtgcgccacccgccaggagccgctgctcatcggctccaccaagtccaacatggggcacccggagccagcctcggggctggcagccctggccaaggtgctgctgtccctggagcacgggctctgggcccccaacctgcacttccatagccccaaccctgagatcccagcgctgttggatgggcggctgcaggtggtggaccagcccctgcccgtccgtggcggcaacgtgggcatcaactcctttggcttcgggggctccaacgtgcacatcatcctgaggcccaacacgcagccgccccccgcacccgccccacatgccaccctgccccgtctgctgcgggccagcggacgcacccctgaggccgtgcagaagctgctggagcagggcctccggcacagccaggacctggctttcctgagcatgctgaacgacatcgcggctgtccccgccaccgccatgcccttccgtggctacgctgtgctgggtggtgagcgcggtggcccagaggtgcagcaggtgcccgctggcgagcgcccgctctggttcatctgctctgggatgggcacacagtggcgcgggatggggctgagcctcatgcgcctggaccgcttccgagattccatcctacgctccgatgaggctgtgaagccattcggcctgaaggtgtcacagctgctgctgagcacagacgagagcacctttgatgacatcgtccattcgtttgtgagcctgactgccatccagataggcctcatagacctgctgagctgcatggggctgaggccagatggcatcgtcggccactccctgggggaggtggcctgtggctacgccgacggctgcctgtcccaggaggaggccgtcctcgctgcctactggaggggacagtgcatcaaagaagcccatctcccgccgggcgccatggcagccgtgggcttgtcctgggaggagtgtaaacagcgctgccccccgggcgtggtgcccgcctgccacaactccaaggacacagtcaccatctcgggacctcaggccccggtgtttgagttcgtggagcagctgaggaaggagggtgtgtttgccaaggaggtgcggaccggcggtatggccttccactcctacttcatggaggccatcgcacccccactgctgcaggagctcaagaaggtgatccgggagccgaagccacgttcagcccgctggctcagcacctctatccccgaggcccagtggcacagcagcctggcacgcacgtcctccgccgagtacaatgtcaacaacctggtgagccctgtgctgttccaggaggccctgtggcacgtgcctgagcacgcggtggtgctggagatcgcgccccacgccctgctgcaggctgtcctgaagcgtggcctgaagccgagctgcaccatcatccccctgatgaagaaggatcacagggacaacctggagttcttcctggccggcatcggcaggctgcacctctcaggcatcgacgccaaccccaatgccttgttcccacctgtggagttcccagctccccgaggaactcccctcatctccccactcatcaagtgggaccacagcctggcctgggacgtgccggccgccgaggacttccccaacggttcaggttccccctcagccgccatctacaacatcgacaccagctccgagtctcctgaccactacctggtggaccacaccctcgacggtcgcgtcctcttccccgccactggctacctgagcatagtgtggaagacgctggcccgcgccctgggcctgggcgtcgagcagctgcctgtggtgtttgaggatgtggtgctgcaccaggccaccatcctgcccaagactgggacagtgtccctggaggtacggctcctggaggcctcccgtgccttcgaggtgtcagagaacggcaacctggtagtgagtgggaaggtgtaccagtgggatgaccctgaccccaggctcttcgaccacccggaaagccccacccccaaccccacggagcccctcttcctggcccaggctgaagtttacaaggagctgcgtctgcgtggctacgactacggccctcatttccagggcatcctggaggccagcctggaaggtgactcggggaggctgctgtggaaggataactgggtgagcttcatggacaccatgctgcagatgtccatcctgggctcggccaagcacggcctgtacctgcccacccgtgtcaccgccatccacatcgaccctgccacccacaggcagaagctgtacacactgcaggacaaggcccaagtggctgacgtggtggtgagcaggtggctgagggtcacagtggccggaggcgtccacatctccgggctccacactgagtcggccccgcggcggcagcaggagcagcaggtgcccatcctggagaagttttgcttcactccccacacggaggaggggtgcctgtctgagcgcgctgccctgcaggaggagctgcaactgtgcaaggggctggtgcaggcactgcagaccaaggtgacccagcaggggctgaagatggtggtgcccggactggatggggcccagatcccccgggacccctcacagcaggaactgccccggctgttgtcggctgcctgcaggcttcagctcaacgggaacctgcagctggagctggcgcaggtgctggcccaggagaggcccaagctgccagaggaccctctgctcagcggcctcctggactccccggcactcaaggcctgcctggacactgccgtggagaacatgcccagcctgaagatgaaggtggtggaggtgctggctggccacggtcacctgtattcccgcatcccaggcctgctcagcccccatcccctgctgcagctgagctacacggccaccgaccgccacccccaggccctggaggctgcccaggccgagctgcagcagcacgacgttgcccagggccagtgggatcccgcagaccctgcccccagcgccctgggcagcgccgacctcctggtgtgcaactgtgctgtggctgccctcggggacccggcctcagctctcagcaacatggtggctgccctgagagaagggggctttctgctcctgcacacactgctccgggggcaccccctcggggacatcgtggccttcctcacctccactgagccgcagtatggccagggcatcctgagccaggacgcgtgggagagcctcttctccagggtgtcgctgcgcctggtgggcctgaagaagtccttctacggctccacgctcttcctgtgccgccggcccaccccgcaggacagccccatcttcctgccggtggacgataccagcttccgctgggtggagtctctgaagggcatcctggctgacgaagactcttcccggcctgtgtggctgaaggccatcaactgtgccacctcgggcgtggtgggcttggtgaactgtctccgccgagagcccggcgggaaccgcctccggtgtgtgctgctctccaacctcagcagcacctcccacgtcccggaggtggacccgggctccgcagaactgcagaaggtgttgcagggagacctggtgatgaacgtctaccgcgacggggcctggggggctttccgccacttcctgctggaggaggacaagcctgaggagccgacggcacatgcctttgtgagcaccctcacccggggggacctgtcctccatccgctgggtctgctcctcgctgcgccatgcccagcccacctgccctggcgcccagctctgcacggtctactacgcctccctcaacttccgcgacatcatgctggccactggcaagctgtcccctgatgccatcccagggaagtggacctcccaggacagcctgctaggtatggagttctcgggccgagacgccagcggcaagcgtgtgatgggactggtgcctgccaagggcctggccacctctgtcctgctgtcaccggacttcctctgggatgtgccttccaactggacgctggaggaggcggcctcggtgcctgtcgtctacagcacggcctactacgcgctggtggtgcgtgggcgggtgcgccccggggagacgctgctcatccactcgggctcgggcggcgtgggccaggccgccatcgccatcgccctcagtctgggctgccgcgtcttcaccaccgtggggtcggctgagaagcgggcgtacctccaggccaggttcccccagctcgacagcaccagcttcgccaactcccgggacacatccttcgagcagcatgtgctgtggcacacgggcgggaagggcgttgacctggtcttgaactccttggcggaagagaagctgcaggccagcgtgaggtgcttggctacgcacggtcgcttcctggaaattggcaaattcgacctttctcagaaccacccgctcggcatggctatcttcctgaagaacgtgacattccacggggtcctactggatgcgttcttcaacgagagcagtgctgactggcgggaggtgtgggcgcttgtgcaggccggcatccgggatggggtggtacggcccctcaagtgcacggtgttccatggggcccaggtggaggacgccttccgctacatggcccaagggaagcacattggcaaagtcgtcgtgcaggtgcttgcggaggagccggaggcagtgctgaagggggccaaacccaagctgatgtcggccatctccaagaccttctgcccggcccacaagagctacatcatcgctggtggtctgggtggcttcggcctggagttggcgcagtggctgatacagcgtggggtgcagaagctcgtgttgacttctcgctccgggatccggacaggctaccaggccaagcaggtccgccggtggaggcgccagggcgtacaggtgcaggtgtccaccagcaacatcagctcactggagggggcccggggcctcattgccgaggcggcgcagcttgggcccgtgggcggcgtcttcaacctggccgtggtcttgagagatggcttgctggagaaccagaccccagagttcttccaggacgtctgcaagcccaagtacagcggcaccctgaacctggacagggtgacccgagaggcgtgccctgagctggactactttgtggtcttctcctctgtgagctgcgggcgtggcaatgcgggacagagcaactacggctttgccaattccgccatggagcgtatctgtgagaaacgccggcacgaaggcctcccaggcctggccgtgcagtggggcgccatcggcgacgtgggcattttggtggagacgatgagcaccaacgacacgatcgtcagtggcacgctgccccagcgcatggcgtcctgcctggaggtgctggacctcttcctgaaccagccccacatggtcctgagcagctttgtgctggctgagaaggctgcggcctatagggacagggacagccagcgggacctggtggaggccgtggcacacatcctgggcatccgcgacttggctgctgtcaacctggacagctcactggcggacctgggcctggactcgctcatgagcgtggaggtgcgccagacgctggagcgtgagctcaacctggtgctgtccgtgcgcgaggtgcggcaactcacgctccggaaactgcaggagctgtcctcaaaggcggatgaggccagcgagctggcatgccccacgcccaaggaggatggtctggcccagcagcagactcagctgaacctgcgctccctgctggtgaacccggagggccccaccctgatgcggctcaactccgtgcagagctcggagcggcccctgttcctggtgcacccaatcgagggctccaccaccgtgttccacagcctggcctcccggctcagcatccccacctatggcctgcagtgcacccgagctgcgccccttgacagcatccacagcctggctgcctactacatcgactgcatcaggcaggtgcagcccgagggcccctaccgcgtggccggctactcctacggggcctgcgtggcctttgaaatgtgctcccagctgcaggcccagcagagcccagcccccacccacaacagcctcttcctgttcgacggctcgcccacctacgtactggcctacacccagagctaccgggcaaagctgaccccaggctgtgaggctgaggctgagacggaggccatatgcttcttcgtgcagcagttcacggacatggagcacaacagggtgctggaggcgctgctgccgctgaagggcctagaggagcgtgtggcagccgccgtggacctgatcatcaagagccaccagggcctggaccgccaggagctgagctttgcggcccggtccttctactacaagctgcgtgccgctgagcagtacacacccaaggccaagtaccatggcaacgtgatgctactgcgcgccaagacgggtggcgcctacggcgaggacctgggcgcggactacaacctctcccaggtatgcgacgggaaagtatccgtccacgtcatcgagggtgaccaccgcacgctgctggagggcagcggcctggagtccatcatcagcatcatccacagctccctggctgagccacgcgtgagcgtgcgggagggctaggcccgtgcccccgcctgccaccggaggtcactccaccatccccaccccaccccaccccacccccgccatgcaacgggattgaagggtcctgccggtgggaccctgtccggcccagtgccactgccccccgaggctgctagatgtaggtgttaggcatgtcccacccacccgccgcctcccacggcacctcggggacaccagagctgccgacttggagactcctggtctgtgaagagccggtggtgcccgtgcccgcaggaactgggctgggcctcgtgcgcccgtggggtctgcgcttggtctttctgtgcttggatttgcatatttattgcattgctggtagagacccccaggcctgtccaccctgccaagactcctcaggcagcgtgtgggtcccgcactctgcccccatttccccgatgtcccctgcgggcgcgggcagccacccaagcctgctggctgcggccccctctcggccaggcattggctcagcccgctgagtggggggtcgtgggccagtccccgaggagctgggcccctgcacaggcacacagggcccggccacacccagcggccccccgcacagccacccgtggggtgctgcccttatgcccggcgccgggcaccaactccatgtttggtgtttgtctgtgtttgtttttcaagaaatgattcaaattgctgcttggattttgaaatttactgtaactgtcagtgtacacgtctggaccccgtttcatttttacaccaatttggtaaaaatgctgctctcagcctcccacaattaaaccgcatgtgatctccaaaaaaaaaaaaaaaaaaaaaaaa

SEQ ID NO: 214 - RNA, 2520 nt, Homo sapiens
  source 1..2520: mol_type = mRNA
ggatggttgtctattaacttgttcaaaaaagtatcaggagttgtcaaggcagagaagagagtgtttgcaaaagggggaaagtagtttgctgcctctttaagactaggactgagagaaagaagaggagagagaaagaaagggagagaagtttgagccccaggcttaagcctttccaaaaaataataataacaatcatcggcggcggcaggatcggccagaggaggagggaagcgctttttttgatcctgattccagtttgcctctctctttttttcccccaaattattcttcgcctgattttcctcgcggagccctgcgctcccgacacccccgcccgcctcccctcctcctctccccccgcccgcgggccccccaaagtcccggccgggccgagggtcggcggccgccggcgggccgggcccgcgcacagcgcccgcatgtacaacatgatggagacggagctgaagccgccgggcccgcagcaaacttcggggggcggcggcggcaactccaccgcggcggcggccggcggcaaccagaaaaacagcccggaccgcgtcaagcggcccatgaatgccttcatggtgtggtcccgcgggcagcggcgcaagatggcccaggagaaccccaagatgcacaactcggagatcagcaagcgcctgggcgccgagtggaaacttttgtcggagacggagaagcggccgttcatcgacgaggctaagcggctgcgagcgctgcacatgaaggagcacccggattataaataccggccccggcggaaaaccaagacgctcatgaagaaggataagtacacgctgcccggcgggctgctggcccccggcggcaatagcatggcgagcggggtcggggtgggcgccggcctgggcgcgggcgtgaaccagcgcatggacagttacgcgcacatgaacggctggagcaacggcagctacagcatgatgcaggaccagctgggctacccgcagcacccgggcctcaatgcgcacggcgcagcgcagatgcagcccatgcaccgctacgacgtgagcgccctgcagtacaactccatgaccagctcgcagacctacatgaacggctcgcccacctacagcatgtcctactcgcagcagggcacccctggcatggctcttggctccatgggttcggtggtcaagtccgaggccagctccagcccccctgtggttacctcttcctcccactccagggcgccctgccaggccggggacctccgggacatgatcagcatgtatctccccggcgccgaggtgccggaacccgccgcccccagcagacttcacatgtcccagcactaccagagcggcccggtgcccggcacggccattaacggcacactgcccctctcacacatgtgagggccggacagcgaactggaggggggagaaattttcaaagaaaaacgagggaaatgggaggggtgcaaaagaggagagtaagaaacagcatggagaaaacccggtacgctcaaaaagaaaaaggaaaaaaaaaaatcccatcacccacagcaaatgacagctgcaaaagagaacaccaatcccatccacactcacgcaaaaaccgcgatgccgacaagaaaacttttatgagagagatcctggacttctttttgggggactatttttgtacagagaaaacctggggagggtggggagggcgggggaatggaccttgtatagatctggaggaaagaaagctacgaaaaactttttaaaagttctagtggtacggtaggagctttgcaggaagtttgcaaaagtctttaccaataatatttagagctagtctccaagcgacgaaaaaaatgttttaatatttgcaagcaacttttgtacagtatttatcgagataaacatggcaatcaaaatgtccattgtttataagctgagaatttgccaatatttttcaaggagaggcttcttgctgaattttgattctgcagctgaaatttaggacagttgcaaacgtgaaaagaagaaaattattcaaatttggacattttaattgtttaaaaattgtacaaaaggaaaaaattagaataagtactggcgaaccatctctgtggtcttgtttaaaaagggcaaaagttttagactgtactaaattttataacttactgttaaaagcaaaaatggccatgcaggttgacaccgttggtaatttataatagcttttgttcgatcccaactttccattttgttcagataaaaaaaaccatgaaattactgtgtttgaaatattttcttatggtttgtaatatttctgtaaatttattgtgatattttaaggttttcccccctttattttccgtagttgtattttaaaagattcggctctgtattatttgaatcagtctgccgagaatccatgtatatatttgaactaatatcatccttataacaggtacattttcaacttaagtttttactccattatgcacagtttgagataaataaatttttgaaatatggacactgaaaaaaaaaa

SEQ ID NO: 215 - RNA, 1257 nt, Homo sapiens
  source 1..1257: mol_type = mRNA
ctggggagagtatatactgaatttagcttctgagacatgatgctcttcctttttaattaacccagaacttagcagcttatctatttctctaatctcaaaacatccttaaactgggggtgatacttgagtgagagaattttgcaggtattaaatgaactatcttcttttttttttttctttgagacagagtcttgctctgtcacccaggctggagtgcagtggcgtgatctcagctcactgcaacctccgcctcccgggttcaagtgattctcctgcctcagcctcctgagtagctgggattacagtcccaggacatcaaagctctgcagaaagaactcgagcaatttgccaagctcctgaagcagaagaggatcaccctgggatatacacaggccgatgtggggctcaccctgggggttctatttgggaaggtattcagccaaacgaccatctgccgctttgaggctctgcagcttagcttcaagaacatgtgtaagctgcggcccttgctgcagaagtgggtggaggaagctgacaacaatgaaaatcttcaggagatatgcaaagcagaaaccctcgtgcaggcccgaaagagaaagcgaaccagtatcgagaaccgagtgagaggcaacctggagaatttgttcctgcagtgcccgaaacccacactgcagcagatcagccacatcgcccagcagcttgggctcgagaaggatgtggtccgagtgtggttctgtaaccggcgccagaagggcaagcgatcaagcagcgactatgcacaacgagaggattttgaggctgctgggtctcctttctcagggggaccagtgtcctttcctctggccccagggccccattttggtaccccaggctatgggagccctcacttcactgcactgtactcctcggtccctttccctgagggggaagcctttccccctgtctccgtcaccactctgggctctcccatgcattcaaactgaggtgcctgcccttctaggaatgggggacagggggaggggaggagctagggaaagaaaacctggagtttgtgccagggtttttgggattaagttcttcattcactaaggaaggaattgggaacacaaagggtgggggcaggggagtttggggcaactggttggagggaaggtgaagttcaatgatgctcttgattttaatcccacatcatgtatcacttttttcttaaataaagaagcctgggacacagtagatagacacacttaaaaaaaaaaa

SEQ ID NO: 216 - RNA, 5190 nt, Homo sapiens
  source 1..5190: mol_type = mRNA
tctgggggctcggctttgccgcgctcgctgcacttgggcgagagctggaacgtggaccagagctcggatcccatcgcagctaccgcgatgagaggcgctcgcggcgcctgggattttctctgcgttctgctcctactgcttcgcgtccagacaggctcttctcaaccatctgtgagtccaggggaaccgtctccaccatccatccatccaggaaaatcagacttaatagtccgcgtgggcgacgagattaggctgttatgcactgatccgggctttgtcaaatggacttttgagatcctggatgaaacgaatgagaataagcagaatgaatggatcacggaaaaggcagaagccaccaacaccggcaaatacacgtgcaccaacaaacacggcttaagcaattccatttatgtgtttgttagagatcctgccaagcttttccttgttgaccgctccttgtatgggaaagaagacaacgacacgctggtccgctgtcctctcacagacccagaagtgaccaattattccctcaaggggtgccaggggaagcctcttcccaaggacttgaggtttattcctgaccccaaggcgggcatcatgatcaaaagtgtgaaacgcgcctaccatcggctctgtctgcattgttctgtggaccaggagggcaagtcagtgctgtcggaaaaattcatcctgaaagtgaggccagccttcaaagctgtgcctgttgtgtctgtgtccaaagcaagctatcttcttagggaaggggaagaattcacagtgacgtgcacaataaaagatgtgtctagttctgtgtactcaacgtggaaaagagaaaacagtcagactaaactacaggagaaatataatagctggcatcacggtgacttcaattatgaacgtcaggcaacgttgactatcagttcagcgagagttaatgattctggagtgttcatgtgttatgccaataatacttttggatcagcaaatgtcacaacaaccttggaagtagtagataaaggattcattaatatcttccccatgataaacactacagtatttgtaaacgatggagaaaatgtagatttgattgttgaatatgaagcattccccaaacctgaacaccagcagtggatctatatgaacagaaccttcactgataaatgggaagattatcccaagtctgagaatgaaagtaatatcagatacgtaagtgaacttcatctaacgagattaaaaggcaccgaaggaggcacttacacattcctagtgtccaattctgacgtcaatgctgccatagcatttaatgtttatgtgaatacaaaaccagaaatcctgacttacgacaggctcgtgaatggcatgctccaatgtgtggcagcaggattcccagagcccacaatagattggtatttttgtccaggaactgagcagagatgctctgcttctgtactgccagtggatgtgcagacactaaactcatctgggccaccgtttggaaagctagtggttcagagttctatagattctagtgcattcaagcacaatggcacggttgaatgtaaggcttacaacgatgtgggcaagacttctgcctattttaactttgcatttaaaggtaacaacaaagagcaaatccatccccacaccctgttcactcctttgctgattggtttcgtaatcgtagctggcatgatgtgcattattgtgatgattctgacctacaaatatttacagaaacccatgtatgaagtacagtggaaggttgttgaggagataaatggaaacaattatgtttacatagacccaacacaacttccttatgatcacaaatgggagtttcccagaaacaggctgagttttgggaaaaccctgggtgctggagctttcgggaaggttgttgaggcaactgcttatggcttaattaagtcagatgcggccatgactgtcgctgtaaagatgctcaagccgagtgcccatttgacagaacgggaagccctcatgtctgaactcaaagtcctgagttaccttggtaatcacatgaatattgtgaatctacttggagcctgcaccattggagggcccaccctggtcattacagaatattgttgctatggtgatcttttgaattttttgagaagaaaacgtgattcatttatttgttcaaagcaggaagatcatgcagaagctgcactttataagaatcttctgcattcaaaggagtcttcctgcagcgatagtactaatgagtacatggacatgaaacctggagtttcttatgttgtcccaaccaaggccgacaaaaggagatctgtgagaataggctcatacatagaaagagatgtgactcccgccatcatggaggatgacgagttggccctagacttagaagacttgctgagcttttcttaccaggtggcaaagggcatggctttcctcgcctccaagaattgtattcacagagacttggcagccagaaatatcctccttactcatggtcggatcacaaagatttgtgattttggtctagccagagacatcaagaatgattctaattatgtggttaaaggaaacgctcgactacctgtgaagtggatggcacctgaaagcattttcaactgtgtatacacgtttgaaagtgacgtctggtcctatgggatttttctttgggagctgttctctttaggaagcagcccctatcctggaatgccggtcgattctaagttctacaagatgatcaaggaaggcttccggatgctcagccctgaacacgcacctgctgaaatgtatgacataatgaagacttgctgggatgcagatcccctaaaaagaccaacattcaagcaaattgttcagctaattgagaagcagatttcagagagcaccaatcatatttactccaacttagcaaactgcagccccaaccgacagaagcccgtggtagaccattctgtgcggatcaattctgtcggcagcaccgcttcctcctcccagcctctgcttgtgcacgacgatgtctgagcagaatcagtgtttgggtcacccctccaggaatgatctcttcttttggcttccatgatggttattttcttttctttcaacttgcatccaactccaggatagtgggcaccccactgcaatcctgtctttctgagcacactttagtggccgatgatttttgtcatcagccaccatcctattgcaaaggttccaactgtatatattcccaatagcaacgtagcttctaccatgaacagaaaacattctgatttggaaaaagagagggaggtatggactgggggccagagtcctttccaaggcttctccaattctgcccaaaaatatggttgatagtttacctgaataaatggtagtaatcacagttggccttcagaaccatccatagtagtatgatgatacaagattagaagctgaaaacctaagtcctttatgtggaaaacagaacatcattagaacaaaggacagagtatgaacacctgggcttaagaaatctagtatttcatgctgggaatgagacataggccatgaaaaaaatgatccccaagtgtgaacaaaagatgctcttctgtggaccactgcatgagcttttatactaccgacctggtttttaaatagagtttgctattagagcattgaattggagagaaggcctccctagccagcacttgtatatacgcatctataaattgtccgtgttcatacatttgaggggaaaacaccataaggtttcgtttctgtatacaaccctggcattatgtccactgtgtatagaagtagattaagagccatataagtttgaaggaaacagttaataccattttttaaggaaacaatataaccacaaagcacagtttgaacaaaatctcctcttttagctgatgaacttattctgtagattctgtggaacaagcctatcagcttcagaatggcattgtactcaatggatttgatgctgtttgacaaagttactgattcactgcatggctcccacaggagtgggaaaacactgccatcttagtttggattcttatgtagcaggaaataaagtataggtttagcctccttcgcaggcatgtcctggacaccgggccagtatctatatatgtgtatgtacgtttgtatgtgtgtagacaaatatttggaggggtatttttgccctgagtccaagagggtcctttagtacctgaaaagtaacttggctttcattattagtactgctcttgtttcttttcacatagctgtctagagtagcttaccagaagcttccatagtggtgcagaggaagtggaaggcatcagtccctatgtatttgcagttcacctgcacttaaggcactctgttatttagactcatcttactgtacctgttccttagaccttccataatgctactgtctcactgaaacatttaaattttaccctttagactgtagcctggatattattcttgtagtttacctctttaaaaacaaaacaaaacaaaacaaaaaactccccttcctcactgcccaatataaaaggcaaatgtgtacatggcagagtttgtgtgttgtcttgaaagattcaggtatgttgcctttatggtttcccccttctacatttcttagactacatttagagaactgtggccgttatctggaagtaaccatttgcactggagttctatgctctcgcacctttccaaagttaacagattttggggttgtgttgtcacccaagagattgttgtttgccatactttgtctgaaaaattcctttgtgtttctattgacttcaatgatagtaagaaaagtggttgttagttatagatgtctaggtacttcaggggcacttcattgagagttttgtcttggatattcttgaaagtttatatttttataattttttcttacatcagatgtttctttgcagtggcttaatgtttgaaattattttgtggctttttttgtaaatattgaaatgtagcaataatgtcttttgaatattcccaagcccatgagtccttgaaaatattttttatatatacagtaactttatgtgtaaatacataagcggcgtaagtttaaaggatgttggtgttccacgtgttttattcctgtatgttgtccaattgttgacagttctgaagaattctaataaaatgtacatatataaatcaaaaaaaaaaaaaaaa

SEQ ID NO: 217 - RNA, 2949 nt, Homo sapiens
  source 1..2949: mol_type = mRNA
agtttcccgaccagagagaacgaacgtgtctgcgggcgcgcggggagcagaggcggtggcgggcggcggcggcaccgggagccgccgagtgaccctcccccgcccctctggccccccaccctcccacccgcccgtggcccgcgcccatggccgcgcgcgctccacacaactcaccggagtccgcgccttgcgccgccgaccagttcgcagctccgcgccacggcagccagtctcacctggcggcaccgcccgcccaccgccccggccacagcccctgcgcccacggcagcactcgaggcgaccgcgacagtggtgggggacgctgctgagtggaagagagcgcagcccggccaccggacctacttactcgccttgctgattgtctatttttgcgtttacaacttttctaagaacttttgtatacaaaggaactttttaaaaaagacgcttccaagttatatttaatccaaagaagaaggatctcggccaatttggggttttgggttttggcttcgtttcttctcttcgttgactttggggttcaggtgccccagctgcttcgggctgccgaggaccttctgggcccccacattaatgaggcagccacctggcgagtctgacatggctgtcagcgacgcgctgctcccatctttctccacgttcgcgtctggcccggcgggaagggagaagacactgcgtcaagcaggtgccccgaataaccgctggcgggaggagctctcccacatgaagcgacttcccccagtgcttcccggccgcccctatgacctggcggcggcgaccgtggccacagacctggagagcggcggagccggtgcggcttgcggcggtagcaacctggcgcccctacctcggagagagaccgaggagttcaacgatctcctggacctggactttattctctccaattcgctgacccatcctccggagtcagtggccgccaccgtgtcctcgtcagcgtcagcctcctcttcgtcgtcgccgtcgagcagcggccctgccagcgcgccctccacctgcagcttcacctatccgatccgggccgggaacgacccgggcgtggcgccgggcggcacgggcggaggcctcctctatggcagggagtccgctccccctccgacggctcccttcaacctggcggacatcaacgacgtgagcccctcgggcggcttcgtggccgagctcctgcggccagaattggacccggtgtacattccgccgcagcagccgcagccgccaggtggcgggctgatgggcaagttcgtgctgaaggcgtcgctgagcgcccctggcagcgagtacggcagcccgtcggtcatcagcgtcagcaaaggcagccctgacggcagccacccggtggtggtggcgccctacaacggcgggccgccgcgcacgtgccccaagatcaagcaggaggcggtctcttcgtgcacccacttgggcgctggaccccctctcagcaatggccaccggccggctgcacacgacttccccctggggcggcagctccccagcaggactaccccgaccctgggtcttgaggaagtgctgagcagcagggactgtcaccctgccctgccgcttcctcccggcttccatccccacccggggcccaattacccatccttcctgcccgatcagatgcagccgcaagtcccgccgctccattaccaagagctcatgccacccggttcctgcatgccagaggagcccaagccaaagaggggaagacgatcgtggccccggaaaaggaccgccacccacacttgtgattacgcgggctgcggcaaaacctacacaaagagttcccatctcaaggcacacctgcgaacccacacaggtgagaaaccttaccactgtgactgggacggctgtggatggaaattcgcccgctcagatgaactgaccaggcactaccgtaaacacacggggcaccgcccgttccagtgccaaaaatgcgaccgagcattttccaggtcggaccacctcgccttacacatgaagaggcatttttaaatcccagacagtggatatgacccacactgccagaagagaattcagtattttttacttttcacactgtcttcccgatgagggaaggagcccagccagaaagcactacaatcatggtcaagttcccaactgagtcatcttgtgagtggataatcaggaaaaatgaggaatccaaaagacaaaaatcaaagaacagatggggtctgtgactggatcttctatcattccaattctaaatccgacttgaatattcctggacttacaaaatgccaagggggtgactggaagttgtggatatcagggtataaattatatccgtgagttgggggagggaagaccagaattcccttgaattgtgtattgatgcaatataagcataaaagatcaccttgtattctctttaccttctaaaagccattattatgatgttagaagaagaggaagaaattcaggtacagaaaacatgtttaaatagcctaaatgatggtgcttggtgagtcttggttctaaaggtaccaaacaaggaagccaaagttttcaaactgctgcatactttgacaaggaaaatctatatttgtcttccgatcaacatttatgacctaagtcaggtaatatacctggtttacttctttagcatttttatgcagacagtctgttatgcactgtggtttcagatgtgcaataatttgtacaatggtttattcccaagtatgccttaagcagaacaaatgtgtttttctatatagttccttgccttaataaatatgtaatataaatttaagcaaacgtctattttgtatatttgtaaactacaaagtaaaatgaacattttgtggagtttgtattttgcatactcaaggtgagaattaagttttaaataaacctataatattttatctgaaaaaaaaaaaaaaaaaa

SEQ ID NO: 218 - RNA, 2098 nt, Homo sapiens
  source 1..2098: mol_type = mRNA
attataaatctagagactccaggattttaacgttctgctggactgagctggttgcctcatgttattatgcaggcaactcactttatcccaatttcttgatacttttccttctggaggtcctatttctctaacatcttccagaaaagtcttaaagctgccttaaccttttttccagtccacctcttaaattttttcctcctcttcctctatactaacatgagtgtggatccagcttgtccccaaagcttgccttgctttgaagcatccgactgtaaagaatcttcacctatgcctgtgatttgtgggcctgaagaaaactatccatccttgcaaatgtcttctgctgagatgcctcacacggagactgtctctcctcttccttcctccatggatctgcttattcaggacagccctgattcttccaccagtcccaaaggcaaacaacccacttctgcagagaagagtgtcgcaaaaaaggaagacaaggtcccggtcaagaaacagaagaccagaactgtgttctcttccacccagctgtgtgtactcaatgatagatttcagagacagaaatacctcagcctccagcagatgcaagaactctccaacatcctgaacctcagctacaaacaggtgaagacctggttccagaaccagagaatgaaatctaagaggtggcagaaaaacaactggccgaagaatagcaatggtgtgacgcagaaggcctcagcacctacctaccccagcctttactcttcctaccaccagggatgcctggtgaacccgactgggaaccttccaatgtggagcaaccagacctggaacaattcaacctggagcaaccagacccagaacatccagtcctggagcaaccactcctggaacactcagacctggtgcacccaatcctggaacaatcaggcctggaacagtcccttctataactgtggagaggaatctctgcagtcctgcatgcagttccagccaaattctcctgccagtgacttggaggctgccttggaagctgctggggaaggccttaatgtaatacagcagaccactaggtattttagtactccacaaaccatggatttattcctaaactactccatgaacatgcaacctgaagacgtgtgaagatgagtgaaactgatattactcaatttcagtctggacactggctgaatccttcctctcccctcctcccatccctcataggatttttcttgtttggaaaccacgtgttctggtttccatgatgcccatccagtcaatctcatggagggtggagtatggttggagcctaatcagcgaggtttctttttttttttttttcctattggatcttcctggagaaaatactttttttttttttttttttgaaacggagtcttgctctgtcgcccaggctggagtgcagtggcgcggtcttggctcactgcaagctccgtctcccgggttcacgccattctcctgcctcagcctcccgagcagctgggactacaggcgcccgccacctcgcccggctaatattttgtatttttagtagagacggggtttcactgtgttagccaggatggtctcgatctcctgaccttgtgatccacccgcctcggcctccctaacagctgggatttacaggcgtgagccaccgcgccctgcctagaaaagacattttaataaccttggctgccgtctctggctatagataagtagatctaatactagtttggatatctttagggtttagaatctaacctcaagaataagaaatacaagtacaaattggtgatgaagatgtattcgtattgtttgggattgggaggctttgcttattttttaaaaactattgaggtaaagggttaagctgtaacatacttaattgatttcttaccgtttttggctctgttttgctatatcccctaatttgttggttgtgctaatctttgtagaaagaggtctcgtatttgctgcatcgtaatgacatgagtactgctttagttggtttaagttcaaatgaatgaaacaactatttttcctttagttgattttaccctgatttcaccgagtgtttcaatgagtaaatatacagcttaaacat

SEQ ID NO: 219 - RNA, 2264 nt, Homo sapiens
  source 1..2264: mol_type = mRNA
agtatattagtgctaatttccctccgtttgtcctagcttttctcttctgtcaaccccacacgcctttggcacaatgaagtgggtaacctttatttcccttctttttctctttagctcggcttattccaggggtgtgtttcgtcgagatgcacacaagagtgaggttgctcatcggtttaaagatttgggagaagaaaatttcaaagccttggtgttgattgcctttgctcagtatcttcagcagtgtccatttgaagatcatgtaaaattagtgaatgaagtaactgaatttgcaaaaacatgtgttgctgatgagtcagctgaaaattgtgacaaatcacttcataccctttttggagacaaattatgcacagttgcaactcttcgtgaaacctatggtgaaatggctgactgctgtgcaaaacaagaacctgagagaaatgaatgcttcttgcaacacaaagatgacaacccaaacctcccccgattggtgagaccagaggttgatgtgatgtgcactgcttttcatgacaatgaagagacatttttgaaaaaatacttatatgaaattgccagaagacatccttacttttatgccccggaactccttttctttgctaaaaggtataaagctgcttttacagaatgttgccaagctgctgataaagctgcctgcctgttgccaaagctcgatgaacttcgggatgaagggaaggcttcgtctgccaaacagagactcaagtgtgccagtctccaaaaatttggagaaagagctttcaaagcatgggcagtagctcgcctgagccagagatttcccaaagctgagtttgcagaagtttccaagttagtgacagatcttaccaaagtccacacggaatgctgccatggagatctgcttgaatgtgctgatgacagggcggaccttgccaagtatatctgtgaaaatcaagattcgatctccagtaaactgaaggaatgctgtgaaaaacctctgttggaaaaatcccactgcattgccgaagtggaaaatgatgagatgcctgctgacttgccttcattagctgctgattttgttgaaagtaaggatgtttgcaaaaactatgctgaggcaaaggatgtcttcctgggcatgtttttgtatgaatatgcaagaaggcatcctgattactctgtcgtgctgctgctgagacttgccaagacatatgaaaccactctagagaagtgctgtgccgctgcagatcctcatgaatgctatgccaaagtgttcgatgaatttaaacctcttgtggaagagcctcagaatttaatcaaacaaaattgtgagctttttgagcagcttggagagtacaaattccagaatgcgctattagttcgttacaccaagaaagtaccccaagtgtcaactccaactcttgtagaggtctcaagaaacctaggaaaagtgggcagcaaatgttgtaaacatcctgaagcaaaaagaatgccctgtgcagaagactatctatccgtggtcctgaaccagttatgtgtgttgcatgagaaaacgccagtaagtgacagagtcaccaaatgctgcacagaatccttggtgaacaggcgaccatgcttttcagctctggaagtcgatgaaacatacgttcccaaagagtttaatgctgaaacattcaccttccatgcagatatatgcacactttctgagaaggagagacaaatcaagaaacaaactgcacttgttgagctcgtgaaacacaagcccaaggcaacaaaagagcaactgaaagctgttatggatgatttcgcagcttttgtagagaagtgctgcaaggctgacgataaggagacctgctttgccgaggagggtaaaaaacttgttgctgcaagtcaagctgccttaggcttataacatcacatttaaaagcatctcagcctaccatgagaataagagaaagaaaatgaagatcaaaagcttattcatctgtttttctttttcgttggtgtaaagccaacaccctgtctaaaaaacataaatttctttaatcattttgcctcttttctctgtgcttcaattaataaaaaatggaaagaatctaatagagtggtacagcactgttatttttcaaagatgtgttgctatcctgaaaattctgtaggttctgtggaagttccagtgttctctcttattccacttcggtagaggatttctagtttcttgtgggctaattaaataaatcattaatactcttctaaaaaaaaaaaaaaaaaaa

SEQ ID NO: 220 - RNA, 2651 nt, Mus musculus
  source 1..2651: mol_type = mRNA
attcgcgacccgaagctgcgcgggcgcgagccagttggggcactgggtgggcggcggcgacagcggcgccacgcgcaggctggaggccgccgaggctcgccatgccgggagaactctaactcccccatggagtcggccgacttctacgaggtggagccgcggcccccgatgagcagtcacctccagagccccccgcacgcgcccagcaacgccgcctttggctttccccggggcgcgggccccgcgccgcccccagccccacctgccgccccggagccgctgggcggcatctgcgagcacgagacgtctatagacatcagcgcctacatcgacccggccgccttcaacgacgagttcctggccgacctcttccagcacagccgacagcaggagaaggccaaggcggcggcgggccccgcgggtggcggcggtgactttgactacccgggagccccggcgggccccggcggcgcggtcatgtccgcgggggcgcacgggccccctcccggctacggctgtgcggcggccggctacctggacggcaggctggagcccctgtacgagcgcgtcggggcgcccgcgctacggccgctggtgatcaaacaagagccccgcgaggaggacgaggcgaagcagctggcgctggccggcctcttcccctaccagccaccgccgccaccgccaccgccgcacccgcacgcgtctcccgcgcacctggccgccccccacttgcagttccagatcgcgcactgcggccagaccaccatgcacctgcagcctggccaccccacaccgccgcccacgcccgtgcccagcccgcacgctgcgcccgccttgggtgctgcgggcctgcctggccccgggagcgcgctcaagggcttggccggtgcgcaccccgacctccgcacgggaggcggcggcggtggcagcggtgccggtgcgggcaaagccaagaagtcggtggacaagaacagcaacgagtaccgggtacggcgggaacgcaacaacatcgcggtgcgcaagagccgagataaagccaaacaacgcaacgtggagacgcaacagaaggtgctggagttgaccagtgacaatgaccgcctgcgcaagcgggtggaacagctgagccgtgaactggacacgctgcggggcatcttccgccagctgcctgagagctccttggtcaaggccatgggcaactgcgcgtgaggcgcgcggctgcgggaccgccttgggccggccccctggctggagacccagaggatggtttcgggtcgctggatctctaggctgcccgggccgcgcaagccaggactaggagattccggtgtggcctgaaagcctggcctgctccgcgtgtcccctcccttcctctgagccggactcggtgcgtctaagatgagggagtcaggccgtggtggtttctccttgagaccgagagactttccgcggagctgagctgggggcccggcagtactagtattaaggaagtaaccttgtgccttggatactcaaaactcgctccttttcctaccgagtagggggagcaaaaatgtgccttgatattttatttggaggattcctgcttcctctcgggcctcagctggccccgtgagaaaaatgaagggtgcaggcccagggcaggaggaagatacaggaagctgagatcccggcagtgccctgagctgcccctcagtccctgtctttagaggggagggacttaggtgttggggatttgagtctgtgtcctcacccccagctacagggaggtggagggctcctaatcccttgctttttgcacctccacctacatccccccccccccactcagcttacaacaggccaggtttcctgggtgagttcatggagaatgggggcaccacccccagtcagaccagaaagctgagttgtgagttagccatgtggtaggagacagagacctaggtttctgggctttgtggggtgggggataggaggacacggggaccattagccttgtgtgtactgtatgtcgccagccgctgttgctgaaggaacttgaagcacaatcgatccatcccagagggactggagttatgacaagcttcccaaatattttgctttatcatccgatatcaacacttgtatctggtctctgtgtcccagcggtgccttgtgcaatggcagtgtgcacgtctatgctaaaccaccattttatttggtcttttgttttgttttggttttgctctgattcttgccaaactgagactcttcactaacggctgggggaaggagctgagtgaggctctcattctttttggtttagggatgtttgggttttttcgtctgcctcccagaggaccaatgaaatgaagtgggcttccccctctcccctagttgtccaagggtgtatgtagtagtgggtcttagcttcctccggctaagacttaggcttccccacccacccaaccccatccccaacggccctggctctgggtctggaaagaaggccacctccagccagttcatacacacacccctgtggctgggagcagggctggaccgcttccttctcttcttttttttgggggggggggacacaaagtttcatgctagatgtcgtatgtattatatctataatataaacatatcaaactcaaaaaaaaaaaaaaaaa

SEQ ID NO: 221 - RNA, 3539 nt, Mus musculus
  source 1..3539: mol_type = mRNA
tcaaatgtaggtgatgggtcttcaccagaaatagacccttgtgagcttaactagcagtgaagtgtgacttttttctttctcttctttttttcaattcccttggcaaccaaccacaaattagcatctgacattgaattttttaaagctcgtttcaactctcacacacataagtagtgaggaattcagggtaggggttttctactgaggactttttcttcttcacagctgccttctgaaatgtgtggagcaactggtggatggtttcctagcctttcaaaggtagtttacaaatgatttgaagtgctgatcctttcagagtctcaacagattatttcttaaacagctcatacattgctgtttatgcatgaattagaaccgggccacgtagaaaacactgtgattgtacctgggagttggcgagaaaaccagtgctctcccttgattctgctgcacgaggagaatgggctgtgatcggaactgtgggctcattgctggagctgttattggtgcagtcctggctgtgtttggaggcattctcatgccagtcggagacatgcttattgagaagacaatcaaaagggaagttgtccttgaagaaggaaccactgctttcaaaaactgggttaaaacaggcaccactgtgtacagacagttttggatctttgatgtgcaaaacccagatgacgtggcaaagaacagcagcaaaatcaaggttaaacaaagaggtccttacacatacagagttcgttatctagccaaggaaaatataactcaggaccccgaggaccacactgtgtcttttgtacagcccaatggagccatctttgagccttcactgtctgttggaacagaggatgacaacttcacagttctgaatctggctgtagcagctgcaccacatatctaccaaaattcatttgttcaagttgtgctcaactctcttataaaaaagtccaagtcttctatgttccaaacaagatctttgaaagaactcttgtggggttacaaagatccattcctcagtttggttccatatcctataagtaccacagttggtgtgttttatccttacaatgacactgtagatggagtttataaagttttcaatggaaaggataacataagcaaagttgccataattgagtcctataaagggaaaaggaatttgtcctattggccaagctattgcgacatgattaatggcacagacgcagcctcctttccaccttttgttgaaaagtctcggacattgagattcttttcctctgacatttgcaggtctatctacgctgtgttcggatctgaaatcgaccttaaaggaatccccgtgtacagatttgttcttccagccaatgcctttgcatcacccctccagaatccagacaaccattgtttctgcactgaaaaagtaatctccaataactgtacatcttatggtgtgctagacattggcaaatgcaaagaaggaaagcctgtgtatatttcgcttccacatttcctacatgcaagtccagatgtttcagaacctattgaaggcttacatccaaatgaagatgagcataggacatacttagatgtggaacccataactggattcactctacaatttgcaaaacgactgcaggtcaacatattggtcaagccagctagaaaaatagaagcattaaagaatctgaagagaccttacattgtacctatactgtggctaaatgagactgggaccattggtgatgaaaaagcagaaatgttcaaaacacaagtgactgggaaaatcaagctccttggcatggtagagatggccttacttgggattggagtggtgatgtttgttgcttttatgatttcatattgtgcttgcaaatccaagaatggaaaataagtagtggatgagcctacatatacactggctacatctttggtaaagccgatctacaaaatgaaaacttaatatatgcttcgtttttacaaaacacacctatctttaggagaagaaatggtggtgtgtgctctctctctctttctctttctctcttattgcagatatatatttatttgtaaatatatatatatgcaataagtcacagcatatttcaaaagattaatatgtcactataggcaatattttttaataaaatcttgcacttttattaaaagtccatcatttgcaactgagtggacttcaatttctgtagacccaattatcctgtttggttctgatttactgatttgttccatgttggcaaatttcaagaatgtacattctgagaaatttttgttttccctcactggaggaaactgctatcatgactggggtggcccctttgtttatagcaaatttggcttgcaactgtcagcacatggcataagtataacatcttgaaagacttaagaatgaaaaatgaacaattcacatgtgagccactgcttatatattaagtctctccctctctggagttcttggctacagcaaggccagatatcacattggttttggttttgttgtttttgttttgtttttgttttttactctctgacacagagcttatgaaatggacttttttttttttttttagcataccttagctctttgtattttaagtatgtcgtcatgttccatgctgcatagctctttaaaaaacctgagtaggtttttctctttctgctcagctgcaactaataacaaccttggagagctgttatagtgttaaaagatgtaaatgataataaaagaattattaaatggaatcctacaaaagcaacaatgggctttaatatatatttgtggtaatatctcctgctttcataatcacccaaaaaaaggactggtttctaacattaaaagaagtcgttccttaaattcaacctttttgtctagttactattgaatcacagtatgttatttattgtattttattttgttttttgtagaagtgttctatctgagattctgtgtccttctgaatcatttaacctttctgctatgtcttaatgcaattgaacacagatattttgttataattttatagcagcagtgtgagactgaaggcaaatattttccagggtaagacacagtgataggttgttctacttcctttagcagcataatcaatttcacttagtattagtcccaataaattctggtataagacacaaaataaaaacaaacattttctgttctatacgtagaaaaataaaaggaaaggtgagacaactaactctcttgtctagatataaaaataatcaaaactgcatggcagctttgggcaggagtgctggattagtggttaggagtcatcaatgttcctacagaagacctgggcttggtacccagcttctatacgtctgctcacagcctcatatgattcctgtcagttgatactatgcccgcctctcctgtgcacccttctgcactgcatgtggtgatcatttatacactcaggtatgcatgcacacatggaatttaaagaggctggaagagtgtatgagaaggttgtagaggagaaaggagtgtgggaaacgatgtcattaaaatcagattt

SEQ ID NO: 222 - RNA, 4049 nt, Mus musculus
  source 1..4049: mol_type = mRNA
gtcagactctcgatttctcctcctactcctcctccgaggaattctgccccttgtaactgttctgccctcccctttaaaggttgacttgccctacggcgctccaccgcgctccagtcctcttgcgcctcctgctcaacccgctcctgactgccccacgccgcgtagttccagcagcaaagcagaagggtgcaccgggagatggagagcaaagccctgctcctggtggtcctgggagtttggctccagagtttgaccgccttccgaggaggggtggccgcagcagacgcgggaagagatttctcagacatcgaaagcaaatttgccctaaggacccctgaagacacagctgaggacacttgtcatctcattcctggattagcagactctgtgtctaactgccacttcaaccacagcagcaagaccttcgtggtgatccatggatggacggtaacgggaatgtatgagagttgggtgcccaaacttgtggccgccctgtacaagagagaacctgactccaatgtcattgtagtagactggttgtatcgggcccagcaacattatccagtgtcagctggctacaccaagctggtgggaaatgatgtggccagattcatcaactggatggaggaggagtttaactaccccctagacaacgtccacctcttagggtacagccttggagcccatgctgctggcgtagcaggaagtctgaccaataagaaggtcaatagaattactggtttggatccagctgggcctaactttgagtatgcagaagcccccagtcgcctttctcctgatgacgctgattttgtagatgtcttacacacatttaccagggggtcacctggtcgaagtattggaatccagaaaccagtagggcatgttgacatttatcccaatggaggcactttccagccaggatgcaacattggagaagccatccgtgtgattgcagagagaggactcggagacgtggaccagctggtgaagtgctcgcacgagcgctccattcatctcttcattgactccctgctgaatgaagaaaaccccagcaaggcatacaggtgcaactccaaggaagcctttgagaaagggctctgcctgagttgtagaaagaatcgctgtaacaatctgggctatgagatcaacaaggtcagagccaagagaagcagcaagatgtacctgaagactcgctctcagatgccctacaaagtgttccattaccaagtcaagattcacttttctgggactgaggatggcaagcaacacaaccaggccttcgagatttctctgtacggcacagtggccgagagcgagaacattcccttcaccctgcccgaggtttccacaaataaaacctactccttcttgatttacacggaggtggacatcggagaactgctcatgatgaagcttaagtggataagcgactcctacttcagctggcctgactggtggagcagccccagcttcgtcatcgagaggatccgagtgaaagccggagagactcagaaaaaggtcatcttctgtgctagggagaaagtttctcatctgcagaagggaaaggactcagcagtgtttgtgaaatgccatgacaagtctctgaagaagtctggctgacactggacaaacaaacaagagaagaaagcatctgagttctttgaagacagaagaaaacaaagtaaatttaatttaaaaaaataatacccttgtttgggtgtttgaaagtgggttttcctgagtattaatcccagctctatcttgttagttaaacagaagacagtctcaaatattaaacggtggctaacccagggtgaggaatctaatggcccatagcaggtcttccagcattagaagacagcaggcaggagaaacatgctgtcttgtatcccttaagaaggaatcatttgctcccaacaatataagactccatcatgtgacccatttggtcatggtctaaaattagtaagaactctgaggttttatattgagaccttttcaaagttttctcaaagtctaatatagacaatattttttgtggcataagtcaggtccatttctttagtgattgaaacacctggcctttgcaactagtttttttaccattgggatatattccccccaccaaaaaaaaaaaaaaaaaaaaagtaaccaggaacgtgtgacttggcaaaagcagttgaagacatggctcatgaagtcctgacccttggtcccaccacaacaaagtacaagtcaacagagatacaaaacctagactgagtaattcttaatagacttgaatttttatgacttaatccttctatcttttaaatatttgtcagatattttaacattgttctctggagcttgtaagctgggcaatggtggcactcacctttaatcccagcacttggcaggcagaggcaggaggatttctgagttcaaggccagcctggtttacagagtgagttccaggacgtccagagctacacagagaaaccctgtcttgggaaaaaaaaaagaagaagaaggagaagaagaagagggagggagggagggagggagggagggagggagggagggagggagggagggagggagggagggagggagaaggaaggaaggaaggaaggaaggaaggaaggaaggaaggaaggaaggaaggaaggaaggaaggaaggaaagaaagaaagaaagaaagaaagaaagaaagaaagaaagaaagaaagaaagaaagaaagaaagaaagaaagaaagaaagaaagaaagaaagaaagaaagaaagaaagaaaatgagcttgtaattgaggtgacacataaattttgctgaaagacaaaaatgcctaggttgattttacttcttctcttttttgctttcttgaaaaaagtcacaattgtcccatgctgtaaccaagtctggcctcgaactaaactatgtatttcaggctggccttgaactctcaaccatcctgccttagcttcctgtgtcctgggagcttgagaactgtaattttattatcagatttttcttacttgttttcatcaatttgaaatgcccaatatccaatactttgtatttcatttgagactcatctccgccatgcctctgtcacacttctaacacatcacattaatttctagtttagatgtgatcaagttcaaattctgcactgtgcaaagtacaagttttagagcaggaccatttttttttatcacataaaagttgaaattactagaaaatgtgcatatggatgcttgtaaactgctgtgcaaagagaagagccctcaactgtaatagctatagaaagtaccaggattgttgccgctgttttgttttaccttaacaacaacaacaacaaaaatcaataatgaagaattatttatgaacgagatctcacattttcagattgcttttattattcattaatgtaaaatgataaagaagatctatctcagaggctatagctgggagcagaaactgtgaaatttgtgggtatctgaacaccaacccacatgcaaagccccacaagtgtagtcgtcattcaatgtgattcagaaaggaaagagtcaagggatatactggaatatgttagagaagtagttccagatatgctggaatgttagcccttgctaggagaaagctggttgtgcctatgtaatataggacaaaggtgaccgatttcatcaagtttggagtcaattctaacaataaaaatatgtataatttgtcaccggcatccccattattgctaattcattacagtatatacacatccatgcatacatatgtcaatgatgctttagctttcaatttatttattagctgtaaataatgtgtgggtatgtaagaatgcttgtaaacactggaaagtctgttgtggttatctgcagtatagatttgtggtgctaactttgtgtccgtctccatccatgattgtctgtctcactgagccaacttaactctgatgaaacagtacaatgaaataggcttttgaaagaagaaaactcacctgtgtgaagaaatggtatctgctttcaataaaactgagaacattttatcatga

SEQ ID NO: 223 - RNA, 1955 nt, Mus musculus
  source 1..1955: mol_type = mRNA
agggtgaggagaggaaggagagagatggaactagaccggtctgcggggaaacgcgacagttttggtagagggtaggggacagggtggcgccggctaagagggtggccggccggggaggagttagtctggtggggaagctacctcgtgggcgggggcctaatgaagctaagagtcttgggtcgccagtaggaaggaccccttggcagtccctccccttggccttttcctacattactgcttctccctgctggcccctgtgcgctcagctcttgtcactggctgcccgctgcggcctcgaaggccaggacagtgtcttggtaatgtccagggctccaggaagagatgtccttgtggctggaggcctcaatgcctgatgtttctcctgattctgcaacggagttgtggaagacagaacctcaagatgcaggagaccagggaggcaacacttgcatcctcagggaggaagccaggatgccccagtcaactggggttgctttagggatagggttggagtcagcagagcctacagccctgctccccagggcagagaccctcccagagccgacagagcttcgtccacaaaagcggaaaaagggcccagcccccaaaatgctggggaacgagctgtgcagtgtctgtggggacaaagcctctggcttccattacaacgtgctgagctgcgagggctgcaagggattcttccgccgcagtgtcatcaagggagcacgctatgtctgccacagcggtggccactgccccatggacacctacatgcggcggaaatgccaggagtgtcgacttcgcaaatgccgccaggcaggcatgagggaggagtgtgtgctgtcagaagaacagatccgcttgaagaaactgaagcggcaagaagaggaacaggctcaagccacttcggtgtccccaagggtgtcctcacctcctcaagtcctgccacagctcagcccagagcagctgggcatgatcgagaagctggtggctgcccagcaacagtgtaacaggcgctccttctcagaccgcctgcgcgtcacgccttggcccattgcacccgaccctcagagccgggaagcccgacaacagcgctttgcccactttactgagctggccatcgtgtccgtgcaggagattgttgactttgccaaacagctccctggcttcctacagctcagcagggaggaccagatcgccttgctgaagacctctgcaatcgaggtcatgcttctggagacgtcacggaggtacaaccccggcagtgagagcatcaccttcctcaaggacttcagttacaaccgggaagactttgccaaagcagggctgcaggtggagttcatcaaccccatctttgagttctccagagccatgaatgagctgcaactcaatgatgctgagtttgctctgctcattgccatcagcatcttctctgcagaccggcccaacgtgcaggaccagctccaagtagagaggctgcaacacacatatgtggaggccctgcacgcctacgtctccatcaaccacccccacgacccactgatgttcccacggatgctaatgaagctggtgagcctccgtactttgagcagcgtccattcagagcaagtgtttgcccttcgcctgcaggacaaaaagcttccccctctgctgtctgagatctgggatgtccacgagtgactgtttcaccgtgtcctttgtgttggccacatggcgaaggctcactgactgcttcccacgggtggagcagactgagaagggcagacattcctgggagctgggtgaaggagagagccttgcgtagcattaagggagagtcaacaggttgggtgttttctggctgctgggcagttgggatctactaacgttgtataccatctgaagaccttgttgacccaaccaaataaactagccaggagagccactttgtgcagggttcttcagggccccgccca

SEQ ID NO: 224 - RNA, 4299 nt, Mus musculus
  source 1..4299: mol_type = mRNA
agtttccggggaacttttccttaacgtgggcctagtccgaagccgggtgggcgccggcgccatggacgagctggccttcggtgaggcggctctggaacagacactggccgagatgtgcgaactggacacagcggttttgaacgacatcgaagacatgctccagctcatcaacaaccaagacagtgacttcccgggcctgtttgacgccccctatgctgggggtgagacaggggacacaggccccagcagcccaggtgccaactctcctgagagcttctcttctgcttctctggcctcctctctggaagccttcctgggaggacccaaggtgacacctgcacccttgtcccctccaccatcggcacccgctgctttaaagatgtacccgtccgtgtcccccttttcccctgggcctgggatcaaagaggagccagtgccactcaccatcctacagcctgcagcgccacagccgtcaccggggaccctcctgcctccgagcttccccgcaccacccgtacagctcagccctgcgcccgtgctgggttactcgagcctgccttcaggcttctcagggacccttccaggaaacactcagcagccaccatctagcctgccgctggcccctgcaccaggagtcttgcccacccctgccctgcacacccaggtccaaagcttggcctcccagcagccgctgccagcctcagcagcccctagaacaaacactgtgacctcacaggtccagcaggtcccagttgtactgcagccacacttcatcaaggcagactcactgctgctgacagctgtgaagacagatgcaggagccaccgtgaagactgcaggcatcagcaccctggctcctggcacagccgtgcaggcaggtcccctgcagaccctggtgagtggagggaccatcttggccacagtacctttggttgtggacacagacaaactgcccatccaccgactcgcagctggcagcaaggccctaggctcagctcagagccgtggtgagaagcgcacagcccacaatgccattgagaagcgctaccggtcttctatcaatgacaagattgtggagctcaaagacctggtggtgggcactgaagcaaagctgaataaatctgctgtcttgcgcaaggccatcgactacatccgcttcttgcagcacagcaaccagaagctcaagcaggagaacctgaccctacgaagtgcacacaaaagcaaatcactgaaggacctggtgtcagcttgtggcagtggaggaggcacagatgtgtctatggagggcatgaaacccgaagtggtggagacgcttacccctccaccctcagacgccggctcaccctcccagagtagccccttgtcttttggcagcagagctagcagcagtggtggtagtgactctgagcccgacagtccagcctttgaggatagccaggtcaaagcccagcggctgccttcacacagccgaggcatgctggaccgctcccgcctggccctgtgtgtactggcctttctgtgtctgacctgcaatcctttggcctcgcttttcggctggggcattctcactccctctgatgctacgggtacacaccgtagttctgggcgcagcatgctggaggcagagagcagagatggctctaattggacccagtggttgctgccacccctagtctggctggccaatggactactagtgttggcctgcttggctcttctctttgtctatggggaacctgtgactaggccacactctggcccggctgtacacttctggagacatcgcaaacaagctgacctggatttggcccggggagatttcccccaggctgctcaacagctgtggctggccctgcaagcgctgggccggcccctgcccacctcaaacctggatctggcctgcagtctgctttggaacctcatccgccacctgctccagcgtctctgggtgggccgctggctggcaggccaggccgggggcctgctgagggaccgtgggctgaggaaggatgcccgtgccagtgcccgggatgcggctgttgtctaccataagctgcaccagctgcatgccatgggcaagtacacaggaggacatcttgctgcttctaacctggcactaagtgccctcaacctggctgagtgcgcaggagatgctatctccatggcaacactggcagagatctatgtggcagcggccctgagggtcaaaaccagcctcccaagagccctgcacttcttgacacgtttcttcctgagcagcgcccgccaggcctgcctagcacagagcggctcggtgcctcttgccatgcagtggctctgccaccctgtaggtcaccgtttctttgtggacggggactgggccgtgcacggtgcccccccggagagcctgtacagcgtggctgggaacccagtggatccgctggcccaggtgacccggctattccgtgaacatctcctagagcgagcgttgaactgtattgctcagcccagcccaggggcagctgacggagacagggagttctcagatgcccttggatatctgcagttgctaaatagctgttctgatgctgccggggctcctgcttgcagtttctctgtcagctccagcatggctgccaccactggcccagacccagtggccaagtggtgggcctcactgacagctgtggtgatccactggctgaggcgggatgaagaggcagctgagcgcttgtacccactggtagagcatatcccccaggtgctgcaggacactgagagacccctgcccagggcagctctgtactccttcaaggctgcccgggctctgctggaccacagaaaggtggaatctagcccagccagcctggccatctgtgagaaggccagtgggtacctgcgggacagcttagcctctacaccaactggcagttccattgacaaggccatgcagctgctcctgtgtgatctacttcttgtggcccgtaccagtctgtggcagcggcagcagtcaccagcttcagtccaggtagctcacggtaccagcaatggaccccaggcctctgctctggagctgcgtggtttccaacatgacctgagcagcctgcggcggttggcacagagcttccggcctgctatgaggagggtattcctacatgaggccacagctcggctgatggcaggagcaagtcctgcccggacacaccagctcctggatcgcagtctgaggaggagggcaggttccagtggcaaaggaggcactacagctgagctggagccacggcccacatggcgggagcacaccgaggccctgctgttggcatcctgctatctgccccctgccttcctgtcggctcctgggcagcgaatgagcatgctggccgaggcggcacgcaccgtagagaagcttggcgatcaccggctactgctggactgccagcagatgctcctgcgcctgggcggcggaaccaccgtcacttccagctagaccccaaagctttcccttgaggacctttgtcattggctgtggtcttccagagggtgagcctgacaagcaatcaggaccatgccgacctctagtggcagatctggaaattgcagaggctgcactggcccgatggcaccctcttgctctgtaggcaccttagtggcttttccctagctgaggctcaccctgggagacctgtacatagtgtagatccggctgggcctggctccagggcaggcccatgtactactttgacttttgcaaactttattttcataggttgagaaattttgtacagaatattaaaaaatgaaattatttataacttcagttttgtttatctgggtaggcagatgtctgcctcagctgattgctatctttcctggcttgtcctttgggaagccggacttcccatctgttgtaaggtgtatttgctggcttggtgatgctatgttgagccaccttggccctctgatctcatggctcataacccttgaggggccttgatggtctcagttgttcctttgccttccagccctccaccaggtaataaccccgtatatccagaaacacacacagttccctagtcatctctgtgcaccagcataggcgaaggatcagggcccattagtgagtagactgggaaccctgtttgtgtcccccggccccttccctctactcccaaccccttagggaatctggtcggcatccacaggccgcacacttccaaaacaatcgtggtatctttattgacttttttttttctgaatgcaatgactgttttttttttttttaactcttaaggaaaataaacatcttttagaaacagctcg

SEQ ID NO: 225 - RNA, 2251 nt, Mus musculus
  source 1..2251: mol_type = mRNA
ccgcgcttcgctggctttctgctcatctagggtggcagcggctacctacctcagctctcgccctgctgccgccacggcctgggcgctgtccctcagctcccggagctcagcgcgaagccctggccccggcggccggggcatgggtcaggggcgcggcgtgaggcggctttctgcacggccgtgacgtgcattggcttcagcatgaagaccctcatcgccgcctactccggggtcctgcggggtgagcgtcgggcggaagctgcccgcagcgaaaacaagaataaaggatctgccctgtcacgcgaggggtctgggcgatggggcactggctccagcatcctctcagccctccaagacatcttctctgtcacctggctcaacagatctaaggtggaaaaacagctgcaggtcatctcagtactacaatgggtcctatccttcctggtgctaggagtggcctgcagtgtcatcctcatgtacaccttctgcacagactgctggctgatagctgtgctctacttcacctggctggcatttgactggaacacgcccaagaaaggtggcaggagatcgcagtgggtgcgaaactgggccgtgtggcgctacttccgagactactttcccatccagctggtgaagacacacaacctgctgaccaccaggaactatatctttggataccacccccatggcatcatgggcctgggtgccttctgtaacttcagcacagaggctactgaagtcagcaagaagtttcctggcataaggccctatttggctacgttggctggtaacttccggatgcctgtgcttcgcgagtacctgatgtctggaggcatctgccctgtcaaccgagacaccatagactacttgctctccaagaatgggagtggcaatgctatcatcatcgtggtgggaggtgcagctgagtccctgagctccatgcctggcaagaacgcagtcaccctgaagaaccgcaaaggctttgtgaagctggccctgcgccatggagctgatctggttcccacttattcctttggagagaatgaggtatacaagcaggtgatctttgaggagggttcctggggccgatgggtccagaagaagttccagaagtatattggtttcgccccctgcatcttccatggccgaggcctcttctcctctgacacctgggggctggtgccctactccaagcccatcaccaccgtcgtgggggagcccatcactgtccccaagctggagcacccgacccagaaagacatcgacctgtaccatgccatgtacatggaggccctggtgaagctctttgacaatcacaagaccaaatttggccttccagagactgaggtgctggaggtgaactgacccagccctcgcgtgccagctcctgggagggacgactgcagatccttttctaccgagttcttgagtgcattttgttctgtaaatttggaagcgtcatgggtgtctgtgggttatttaaaagaaattataatttgttaaaccattgcaatgttagatgttttttaagaagggaagagtcagtattttaagctcacttctagtgtgtcctgctcaaggtggaggctgatatttatgggccttggtggtttcttacccaccccttctagcgttccccagacgacagacacttggccctggctagctgggcaagggcagtccttagtgactccagggattcttgagaggcagaggccatgtcccacccgtggctgcaggtcgggttcctcgtaccaaggggaggctgagggcacagctggccccacttggggagggtagataacatctggactgcccggcttgggtctctgctcctcaccctagccctcttctccaatctgagcctaccctggcctcctgtctcctggctagggacacggctgtcccacaggtgccgtcttgggttatctcgctgctgttggctggtttcactctggaggttggcaccatggacacagctcagcgttgctctggcgcatatcctcctgagccacaccccaagtctggtgtgaggaagggcttctcttctcttcacagaggtgcctggcttcctgtgcagcacactgggtccaggacaggaggccccccccccaaaccaagcctcacgtgtgtgcctttatgaggcgttgggagaaagctaccctcctgtgtattctgttttctccatgagattgttgtgccatgtcacacttttgtatattcctagactaataaatggaaacaagaa

SEQ ID NO: 226 - RNA, 9938 nt, Mus musculus
  source 1..9938: mol_type = mRNA
gtggaatcgcagcgacacggacctgtccccccgcgtggccctggtgtcctcctcagtgcagagtttccagtgtgaccaagcacgcccgacccacactgcgcgcgcacagtgcacacctggcaccggccgcgagggggtgggggtgggaggacagagatgagggcgtcgggatgagccccgcgtggcccgcgcgaggccgggggcggggacggaagcaggcgggggctgcgcgttccttgtgctccagcgcgcgcccgtgcagggtcccggctgggggcggcgcgcgcgggcatcaccccaccggcggcggcgcgccgggtcccggggcgcagccccgacgctcattggcctgggcggcgcagccaagctgtcagcccatgtggcgtggccgcgcggggatggccgcggtttaaatagcgccggcgcggcctagagggagccagagagacggcagcggcgtcccgtccagttcgcctgccgcgctcctcgcttgtcgtctgcctccagagcccagacagagaagagccatggaggaggtggtgatagccggtatgtcggggaagttgcccgagtcagagaacctacaggagttctgggccaacctcattggtggtgtggacatggtcacagatgatgacaggagatggaaggctgggctctatggattacccaagcggtctggaaagctgaaggatctctccaagttcgacgcctccttttttggggtccaccccaagcaggcacacacaatggacccccagcttcggctgctgttggaagtcagctatgaagcaattgtggatggaggtatcaacccagcctcactccgaggaacgaacactggcgtctgggtgggtgtgagtggttcagaggcatccgaggcccttagcagagatcccgagacgcttctgggctacagcatggtgggctgccagcgtgcaatgatggccaaccggctctctttcttcttcgacttcaaaggaccaagcattgccctggacacagcctgctcctccagcttgctggcactacagaatgcctaccaggccatccgtagtggggaatgccccgcggcccttgtgggtgggatcaacctgctcctgaagccgaacacctctgtgcagttcatgaagctgggcatgctcagcccggacggcacctgcagatcctttgatgattcagggagtggatattgtcgctctgaggctgttgtagcagttctgctgactaagaagtccctggctcggcgggtctatgccacgattctgaatgccggcaccaatacagatggcagcaaggagcaaggtgtaacattcccctctggagaagtccaagaacaactcatctgctctctgtatcagccagctggtctggccccggagtcgcttgagtatattgaagcccatggcacgggcaccaaggtgggtgacccccaggaactgaatggcattactcggtccctgtgcgccttccgccaggcccctctgttaattggctccaccaaatccaacatgggacaccctgagcctgcctctgggcttgcagccctgaccaaggtgctgttatccctggagcatggggtctgggcccctaacctgcacttccacaaccccaaccctgagatcccagcacttcttgatgggcggctgcaggtggtcgataggcccctgcctgttcgtggtggcaacgtgggcatcaactcatttggcttcggaggctccaatgttcatgtcatcctccagcccaacacacggcaggcccctgcgcccactgcacacgctgcccttccccatttgctgcacgccagtggacgcaccttagaggcagtgcaggacctgctggaacagggccgccagcacagccaggacctggcctttgtgagcatgctcaatgacattgcggcaacccctacagcagccatgcccttcaggggttacactgtgctaggtgttgagggccgtgtccaagaagtgcagcaagtgtccaccaacaagcgcccactctggttcatctgctcagggatgggcacgcagtggcgcgggatggggctgagcctcatgcgcctggacagcttccgtgagtctatcctgcgctccgatgaggctgtgaagccgttgggagtgaaagtgtcagatctgctgttgagcacagatgagcgcacctttgatgacatcgtgcatgcctttgtgagcctcactgccatccagattgccctcatcgacctactgacttctgtgggactgaaacctgacggcatcattgggcactccttgggagaggttgcctgtggctatgcagatggctgtctctcccagagagaggctgtgcttgcagcttactggcgaggccagtgcatcaaagatgcccacctcccgcctggatccatggcagctgttggtttgtcctgggaggaatgtaaacagcgctgccccgctggcgtggtgcctgcctgccacaactctgaggacaccgtgaccatctctggacctcaggctgcagtgaatgaatttgtggagcagctaaagcaagaaggtgtgtttgccaaggaggtacgaacaggaggcctggctttccactcctacttcatggaaggaattgcccccacattgctgcaggctctcaagaaggtgatccgggaaccacggccgcgctcggctcgatggctcagcacctctatccctgaggcccagtggcagagcagcctggcccgcacatcttctgccgagtacaatgtcaacaacctggtgagccctgtgctcttccaggaagcactgtggcacatccctgagcatgccgtggtgctggagattgcgccccacgcactgttgcaggctgtcctgaagcgaggcgtgaagtccagctgcaccatcattcccttgatgaagagggatcataaagataacttggagttctttctcaccaaccttggcaaggtgcacctcacaggcatcaatgtcaaccctaacgccttgttcccacctgtggagttcccggctccccgagggactcctctcatctcccctcacatcaagtgggaccacagtcagacttgggatgtcccggttgctgaggacttcccaaacggctccagctcctcctctgctacagtctacagcatcgacgccagtcctgagtcgcccgaccactacctggtagaccactgcattgacggccgggtcatcttccctggcactggctacctgtgcctggtgtggaagacactggctcgcagcctgggcttgtccctagaagagacccctgtggtatttgagaatgtgtcgtttcatcaggccactatactacccaagacaggaaccgtggcgctggaggtgaggctgctagaggcctcccatgcctttgaggtgtctgacactggcaatctgattgtgagcggaaaagtgtacctgtgggaagacccgaactccaagttattcgaccacccagaagtcccaacaccccctgagtctgcatcggtctcccgcctgacccagggagaagtatacaaggagctgcggctgcgtggctatgattatggccctcagttccagggcatctgtgaggccacccttgaaggtgaacaaggcaagctgctctggaaagataactgggtgaccttcatggacacaatgctgcaggtatccattctgggttctagccagcagagtctacagctacctacccgtgtgaccgccatctatatcgaccctgccacccaccgtcagaaggtgtacaggctgaaggaggacactcaagtggctgatgtgacaacgagccgctgtctgggcataacggtctctggtggtatccacatctcaagactacagacgacagcaacctcacggcggcagcaagaacagctggtccccaccttggaaaagttcgttttcacaccgcacatggaggctgagtgcctgtctgagagcactgccctgcagaaggagctgcaactgtgcaagggtctggcacgggctctgcagaccaaggccacccagcaagggctgaaggcggcaatgcttgggcaagaggaccctccacagcacgggctgcctcgactcctggcagctgcttgccagttgcagctcaacgggaacctgcagctggagctgggagaagcgctggctcaagagaggctcctgctgccagaagaccctctgatcagtggcctcctcaactcccaggccctcaaggcctgcgtagacacagccctggagaacttgtctactctcaagatgaaggtggcagaggtgctggctggagaaggccacttgtattcccgaatcccggcactgctcaacacccagcccatgctacaactggaatacacagccaccgaccggcacccccaggccctgaaggatgttcagaccaaactgcagcagcatgatgtggcgcagggccagtggaacccttccgaccctgcgcccagcagcctgggtgcccttgaccttctggtgtgcaactgtgcattagccaccctgggggatccagccttggccctggacaacatggtagctgccctcaaggaaggtggtttcctgctagtgcacacagtgctcaaaggacatgcccttggggagaccctggcctgcctaccctctgaggtgcagcctgcgcccagcctcctaagccaggaggagtgggagagcctgttctcgaggaaggcactacacctggtgggccttaaaaggtccttctacggtactgcgctgttcctgtgccggcgagccatcccacaggagaaacctatcttcctgtctgtggaggataccagcttccagtgggtggactctctgaagagcactctggccacgtcctcctcccagcctgtgtggctaacggccatggactgccccacctcgggtgtggtgggtttggtgaattgtctccgaaaagagccgggtggacaccggattcggtgtatcctgctgtccaacctcagcaacacatctcacgcccccaagttggaccctggctctccagagctacagcaggtgctaaagcatgacctcgtgatgaacgtgtaccgggacggggcctggggtgccttccgtcacttccagttagagcaggacaagcccaaggagcagacagcgcatgcctttgtaaacgtcctcacccgaggggacctcgcctccatccgctgggtctcctcccccctgaagcacacgcagccctcgagctcaggagcacagctctgcactgtctactacgcctcactgaacttccgagacatcatgctggccacgggcaagctgtcccctgatgccattccaggtaaatgggccagccgagactgcatgctcggcatggagttctcaggccgggataggtgtggccggcgtgtgatggggctggttcctgcagaaggcctggccacctcagtcctgctatcatctgacttcctctgggatgtaccctccagctggaccctggaggaggcggcctctgtgcccgtcgtctataccactgcttactactcgttagtggttcgcgggcgcatccagcgtggggagaccgtgctcatccactcaggttcaggtggtgtgggccaagcggccatttccattgccctcagtctgggctgccgcgtcttcaccactgtgggctctgcagagaagcgagcatacctccaggccaggttccctcagcttgatgacaccagctttgccaactcgagggacacatcatttgagcagcacgtgttactgcacacaggtggcaaaggggtcgacctggtcctcaactcactggcagaagagaagctgcaggccagtgtgcggtgcttggctcagcatggtcgcttcttagagattggcaaatttgatctttctaacaaccaccctctgggcatggctatcttcttgaagaacgtcactttccatgggatcctgctggacgccctttttgaggaggccaatgacagctggcgggaggtggcggcactcctgaaggctggcattcgtgatggagtcgtgaagcccctcaagtgcacagtgtttcccaaggcccaggtggaagatgccttccgctacatggctcaggggaaacacattggcaaagtccttgtccaggtacgggaggaggagcctgaggctgtgctgccaggggctcagcccaccctgatttctgccatctccaagaccttctgcccagcccataagagttacatcatcactggtggcctaggtggctttggcctggagctggcccggtggctcgtgcttcgcggagcccagaggcttgtgctgacttcccgatctggaatccgcaccggctaccaagccaagcacattcgggagtggagacgccagggcatccaagtgctcgtgtcaacaagcaacgtgagctcactggagggggcccgtgctctcatcgccgaagccacaaagctggggcccgttgggggtgtcttcaacctggccatggttttgagggatgccatgctggagaaccagaccccagagctcttccaggatgtcaacaagcccaaatacaatggcaccctgaaccttgacagggcaacccgggaagcctgccctgagctggactactttgtggccttctcctctgtaagctgcgggcgtggtaatgctggccaaactaactacggcttcgccaactctaccatggagcgtatatgtgaacagcgcaggcacgatggcctcccaggccttgccgtgcagtggggtgccattggtgacgtgggcattgtcctggaagcgatgggcaccaatgacacagtcatcggaggtacgctgcctcagcgcatctcctcctgcatggaggtactggacctcttcctgaatcagccccacgcagtcctgagcagctttgtgctggcagagaagaaagctgtggcccatggggacggggacacccagagggatctggtgaaagctgtagcacacatcctaggcatccgagacctcgcaggtattaacctggacagcacgctggcagacctcggcctggactcgctcatgggtgtggaagttcgtcagatcctggaacgagaacacgatctggtgctgcccatgcgtgaggtgcggcagctcacgctgcggaaacttcaggaaatgtcctccaagactgactcggctactgacacgacagcccccaagtccaggagtgacacgtctctgaagcagaaccaactgaacctgagcacactgctggtgaaccctgagggtcctaccctaacccagctcaactcggtgcagagctctgagcggcctctgttccttgtgcaccccattgagggttccaccaccgtgttccacagtctggctgccaagctcagtgtgcccacctacggcctgcagtgcacccaagctgcccccctggatagcattccgaacctggctgcctactacatagattgcatcaagcaagtgcagcctgagggaccctaccgcatagctgggtactcatttggagcctgtgtagccttcgagatgtgctcccagctgcaggcccagcagggcccagccccgacccacaacaacctcttcctgtttgacggctcacacacctacgtgttggcctacacccagagctaccgggcaaagatgaccccaggctgtgaagccgaggccgaggctgaggccttatgcttcttcataaagcagtttcttgatgtggaacacagcaaggtgctggaggccctgctgccactgaagagcctggaagatcgggtggctgcctccgtggaccttatcactaagagtcaccacagcctggaccgccgagagctgagctttgctgccgtgtccttctaccacaagctccgggcagctgatcagtataagcccaaggccaagtaccatggcaacgtgacactgctgcgtgccaagacaggcggcacctatggcgaggacttgggtgctgactacaacctctcccaggtgtgtgacgggaaggtgtctgtgcacatcattgagggtgaccaccgcacactgctggagggcagtggcctggaatccatcatcaacatcatccatagctccctggctgagccacgagtgagtgtacgggagggctagacctgccgaccaccatgaagccacgctccacacctgccaccagagatgctccgatccccaccacaccctgagtgcaggaactggggagggtcctgctggtgggacccctccccccagtggcccagcaccacccgctcccctggtggctgctacaaacagaccatcacgcgtgtgtttcccagccgcgtagtggggttcccagagccactgacttggagacaccctggtctgtgaagagtcagtggaggcaggagccaaactgagccttttctaccgtgtggcatttgccacgctggtcgtttctccattaaattctcatatttattgcattgctgggaaagacccccaggggtgactcattccagaaccccctaaaatgggagaagccatgtggggaagatttctgggaaagtttctagactcaatacacaggctgctggctggagcccctttttgtcttgtcctgtccctgctcactgcagggcaggatatggagagggctggttcccagggaacaaggaccccagcagacactgtagcccgtggcccttggtccccagcatccccggctgccccatgatgcagggccatcctgactctgcggaccgcaccgggcactgactgtctgttttccaagacgaaaatgatgcttgggttttgacttttctgcagctgtcagtgtgaagaagtgtctggactgtgtcatttttacaccaacctggtaaaaatgctgctcttgatgctctcctgatcccacaattaaactgcacgtgagcgagcactgccttcggttcagtctctttccagtccaggcccggcttcaggctctgatacttatgggtattccccacaagtggcctccacagctcttccagtgagactccttggagggtgtgccattctgtcagtataaggggagtatgctaaaatgtgtttcagcatggagggctggctggaggccttgccactgtagtacaagcagaatttgtccacctttaagttgccctgagggcatcagcttagtcacagccccgccccagcggtagagaatagcatcatcctctacttgtagtcaactgagtgttggtgcaagccctctagagaaaaacgtaagcagtatgtgaccactgtgagaagcatgtccctggaaacaggtgacatgacgagagcagagggcctgagtcacacagaactgaccatgtgtgtaagcagaggagtggaggttgcttggaagaggaggatcaagagaaaagtaggctcagtttagtggacccacagtagcagccaatgtaattacattggcttggagctaaggcatggtgggtcctgcagggtggcttgttggactaggcaaagtcccctggcttgagggtccaggagagactgtcacaaggccgcagcattcgatcacatccagagaggagcatccagaggacaactgcattggtagggtacaaaggtgttcagaggatcccagtctgagtgattagcctaagactgaagcatctggttggctctagtcacacttagaaaaattcttacagcactcgtcatgagttgtccattcctggaaaggacctgcccaatctctatagtgtctctacctagttagagtttactgactcaagggagcagatttataaacttgcagaaaggcccgactcccttacgaggctgtgtggtccttagaattcatggatgagaggcaataaaaccttgaggttccttcctgttctttgtgattgcctaacaagacataaactgggtgtgatgagattgctcagtggatagagcgctgtgcagcctgagtttgatcactggaacccatgcagcagtagaaaagactaagttgtcctctgacctccacacatctgttgagtggaacaagactgaaat

SEQ ID NO: 227 - RNA, 2043 nt, Mus musculus
  source 1..2043: mol_type = mRNA
tgcacacagatcacctttcctatcaaccccactagcctctggcaaaatgaagtgggtaacctttctcctcctcctcttcgtctccggctctgctttttccaggggtgtgtttcgccgagaagcacacaagagtgagatcgcccatcggtataatgatttgggagaacaacatttcaaaggcctagtcctgattgccttttcccagtatctccagaaatgctcatacgatgagcatgccaaattagtgcaggaagtaacagactttgcaaagacgtgtgttgccgatgagtctgccgccaactgtgacaaatcccttcacactctttttggagataagttgtgtgccattccaaacctccgtgaaaactatggtgaactggctgactgctgtacaaaacaagagcccgaaagaaacgaatgtttcctgcaacacaaagatgacaaccccagcctgccaccatttgaaaggccagaggctgaggccatgtgcacctcctttaaggaaaacccaaccacctttatgggacactatttgcatgaagttgccagaagacatccttatttctatgccccagaacttctttactatgctgagcagtacaatgagattctgacccagtgttgtgcagaggctgacaaggaaagctgcctgaccccgaagcttgatggtgtgaaggagaaagcattggtctcatctgtccgtcagagaatgaagtgctccagtatgcagaagtttggagagagagcttttaaagcatgggcagtagctcgtctgagccagacattccccaatgctgactttgcagaaatcaccaaattggcaacagacctgaccaaagtcaacaaggagtgctgccatggtgacctgctggaatgcgcagatgacagggcggaacttgccaagtacatgtgtgaaaaccaggcgactatctccagcaaactgcagacttgctgcgataaaccactgttgaagaaagcccactgtcttagtgaggtggagcatgacaccatgcctgctgatctgcctgccattgctgctgattttgttgaggaccaggaagtgtgcaagaactatgctgaggccaaggatgtcttcctgggcacgttcttgtatgaatattcaagaagacaccctgattactctgtatccctgttgctgagacttgctaagaaatatgaagccactctggaaaagtgctgcgctgaagccaatcctcccgcatgctacggcacagtgcttgctgaatttcagcctcttgtagaagagcctaagaacttggtcaaaaccaactgtgatctttacgagaagcttggagaatatggattccaaaatgccattctagttcgctacacccagaaagcacctcaggtgtcaaccccaactctcgtggaggctgcaagaaacctaggaagagtgggcaccaagtgttgtacacttcctgaagatcagagactgccttgtgtggaagactatctgtctgcaatcctgaaccgtgtgtgtctgctgcatgagaagaccccagtgagtgagcatgttaccaagtgctgtagtggatccctggtggaaaggcggccatgcttctctgctctgacagttgatgaaacatatgtccccaaagagtttaaagctgagaccttcaccttccactctgatatctgcacacttccagagaaggagaagcagattaagaaacaaacggctcttgctgagctggtgaagcacaagcccaaggctacagcggagcaactgaagactgtcatggatgactttgcacagttcctggatacatgttgcaaggctgctgacaaggacacctgcttctcgactgagggtccaaaccttgtcactagatgcaaagacgccttagcctaaacacatcacaaccacaaccttctcaggctaccctgagaaaaaaagacatgaagactcaggactcatcttttctgttggtgtaaaatcaacaccctaaggaacacaaatttctttaaacatttgacttcttgtctctgtgctgcaattaataaaaaatggaaagaatctac

SEQ ID NO: 228 - RNA, 10018 nt, Homo sapiens
  source 1..10018: mol_type = mRNA
ggcccccgccgggtgctgagcgcccgccaccgccctcttggccttttcccggtccccgccgcgcgcctgctgctgtccccgtgcccgaggactgggaggatggggctgagccgcttgcctgacttttgatccgaccagtaatcactttgcccgtgtggcgcgtggcccgttgcctgaggcttcctggcgcgtggggctgtttggtcccctccggagtgcggtgaggcgggccgagccgggactgcctgggtttggggataacgttcccatctccacccctgttgcagcaagggaaattgaggctgagggaactgggcccagggacggcgagccgtggctgcctctccagtccgggccccgaagggctgctcgtggatgaaccagactgattttaaggggtgaagagggtgcgtttcaatcagatgcttctggaacgtcgaaattgtcttctttggaaagaaccatcccctctttgggcttcagaggcccaaattgaggcgcaatgatgagaggatgtggtggtctactctgatgtcaatcttgagggctaggtctttctggaagtggatatctactcagacagtaagaattataagagctgtaagagctcattttggaggaataatggatgaaccatctcccttggcccaacctctggagctgaaccagcactctcgattcataataggttctgtgtctgaagataactcagaggatgagatcagcaacctggtgaagttggacctactggaggagaaggagggctccttgtcacctgcttctgttggctcagatacactctctgatttggggatctctagcctacaggatggcttggccttgcacataaggtccagcatgtctggcttgcacctagtaaagcagggccgagacagaaagaaaatagattctcaacgagatttcactgtggcttctccagcagaatttgttactcgctttgggggaaataaagtgattgagaaggttcttattgctaacaatggcattgcagcagtgaaatgcatgcggtctatccgtaggtggtcttatgaaatgtttcgaaatgaacgtgcaattagattcgttgtcatggtcacacctgaagaccttaaagccaatgcagaatacattaagatggcagatcactatgtgccagtgcctggaggaccaaacaacaacaactatgcaaatgtggaattaattcttgatattgctaaaaggatcccagtacaagcagtgtgggctggctggggtcatgcttctgagaatcccaaactaccggaacttctcttgaaaaatggcattgccttcatgggtcctccaagccaggccatgtgggctttaggggataagattgcatcttccatagtggctcaaactgcaggtatcccaactcttccctggagcggcagtggtcttcgtgtggactggcaggaaaatgatttttcaaaacgtatcttaaatgttccccaggagctatatgaaaaaggttatgtgaaagatgtggatgatgggctacaggcagctgaggaagttggatatccagtaatgatcaaggcctcagagggaggaggagggaagggaattagaaaagtcaacaatgcagatgacttccctaatctcttcagacaggttcaagctgaagttcctggatctcccatatttgtgatgagactagccaaacaatctcgtcatctggaggtgcagatcttagcggaccaatatggcaatgctatctctttgtttggtcgtgattgctctgtacaacgcaggcatcagaagattattgaagaagcacctgctactattgctactccagcagtatttgaacacatggaacagtgtgcggtgaaacttgccaaaatggtgggttatgtgagtgctgggactgtggaatacctgtacagccaggatggcagcttctactttctggaattgaatcctcggctgcaggtagagcacccttgtacagagatggtggctgatgtcaatctccctgcagcacagctccagattgccatggggattcctctatatagaatcaaggatatccgtatgatgtatggggtatctccctggggtgattctcccattgattttgaagattctgcacacgttccttgtccaaggggccatgttattgctgctcggatcactagtgaaaatccagatgagggttttaagcccagctcaggaacagttcaggagctaaatttccgcagcaataagaatgtttggggatatttcagtgttgctgctgcagggggacttcatgaatttgctgattctcagtttggtcactgcttttcttggggagaaaacagagaagaggcaatttcaaacatggtggtggctttgaaggagctgtctattcggggtgactttcgaactacagttgaatacctgatcaaattgttagagactgaaagctttcagatgaacagaattgatactggctggctggacagactgatagcagaaaaagtacaggctgagcgacctgacaccatgttgggggttgtgtgtggtgccctccacgtggcagatgtgagcctgcggaatagcgtctctaacttccttcactccttagaaaggggtcaagtccttcctgctcatacacttctgaatacagtagatgttgaacttatctatgagggagtcaagtatgtacttaaggtgactcgacagtcccccaactcctatgtggtgatcatgaatggctcatgtgtagaagtagatgtacatcggctgagtgacggtggactgctcttgtcctatgatggcagcagttatactacgtatatgaaagaggaagtggatagatatcgcatcacaattggcaataaaacctgtgtgtttgagaaggaaaatgacccatcggtgatgcgctcaccttctgctgggaagttaatccagtacattgtagaagatggaggtcatgtgtttgccggccagtgctatgctgagattgaggtaatgaagatggtaatgaccttaacagctgtggagtctggctgtatccattacgtcaagcgacctggagcagctcttgaccctggctgtgtactagccaaaatgcaactggacaaccccagcaaggttcagcaggctgaacttcacacaggtagtctgccacggatccagagcacggcactcagaggcgagaaactccatcgagtgttccattatgtcctggataatctggtcaatgtaatgaatggatactgccttccagatcctttctttagcagcaaggtaaaagactgggtagagcgattgatgaaaaccctcagagatccctccctgcctctcctagaattgcaagatattatgaccagtgtgtctggccgcattccccccaatgtggagaagtctatcaagaaggaaatggctcagtatgctagcaacatcacatcagtcctctgtcagtttcccagccagcagattgcaaacatcctagatagccatgcagctacattgaaccggaaatctgaacgggaagtcttctttatgaatactcagagcattgttcagctggtacagaggtaccgaagtggcatccgaggccacatgaaggctgtggtgatggatctgctccggcagtacctgcgagtagagacacaattccagaatggtcactatgacaaatgtgtattcgccctccgagaagagaataaaagtgacatgaacactgtactgaactacatcttctctcacgctcaagtcaccaagaagaatcttctggtcacaatgcttattgatcagttgtgtggccgggaccctactctcactgatgagctgctgaatattctcacagagctaactcaactcagtaagaccaccaatgccaaagtagcacttcgagcacgccaggttcttattgcctcccatttgccatcatatgagcttcgccataaccaagtagagtctatcttcctatcagctattgacatgtatggacatcaattttgcattgagaacctgcagaaactcatcctatcagaaacatctatttttgatgtcctaccaaacttcttctatcacagcaaccaagtagtgaggatggcagctctggaggtgtatgttcgaagggcttatattgcctatgaacttaacagcgtacaacaccgccagcttaaggacaacacctgtgtggtggaattccagttcatgctgcccacatctcatccaaacagagggaacatccctacgctaaacagaatgtccttctcctccaacctcaaccactatggcatgacccatgtagctagtgtcagcgatgtactgttggacaactcattcactccaccttgtcagcggatgggcggaatggtctcttttcggacttttgaagattttgtcaggatctttgatgaagtgatgggctgcttctctgactccccaccccagagtcccacattccctgaggcaggtcacacgtctctttatgatgaggataaggttcccagggatgaaccaattcacattctcaatgtggctatcaagactgactgtgatattgaggatgacaggctggcagctatgttcagagaatttacccagcaaaataaagctaccctggttgaccatgggatccggcgccttactttcctggttgcacaaaaggatttcagaaagcaggtcaactatgaggtggatcggagatttcatagagaattccctaaattttttacattccgagcaagggataagtttgaggaggatcgtatctatcgtcatctggagcctgctctggctttccagttagagctgaaccggatgagaaattttgacctcactgccattccatgtgctaatcacaagatgcacctgtatctcggggcagccaaggtggaagtgggcacagaagtgacagactacaggttctttgttcgtgcaatcatcaggcattctgatctggtcaccaaggaagcttcttttgaatatctgcaaaatgaaggggagcggctactcctggaagccatggatgagttggaagttgcttttaacaatacaaatgtccgcactgactgtaaccacatcttcctcaactttgtgcccacggttatcatggacccatcaaagattgaggaatccgtgcggagcatggtaatgcggtatggaagtcgcctgtggaaattgcgcgtcctccaggcagaactgaaaatcaacattcgcctgacgccaactggaaaagcaattcccatccgcctcttcctgacaaacgagtctggctattacttggatatcagcctatacaaggaagtgactgactccaggacagcacagatcatgtttcaggcatatggagacaaacagggaccactgcatggaatgttaatcaatactccatatgtgaccaaagacctgctgcaatcaaagaggttccaggcacaatccttagggacaacatacatatatgatatcccagagatgtttcggcagtccctgatcaaactctgggagtctatgtccactcaagcatttcttccatctccccctctgccttctgacatgctgacttacactgaactggtactggatgatcaaggtcagctggtccacatgaacaggcttccaggaggaaatgagattggcatggtagcttggaaaatgacctttaaaagtcctgaatatccagaaggccgagatatcattgttattggcaatgacatcacataccgaattgggtcctttgggcctcaagaggatttgttatttctcagagcttccgaacttgctagggcagaaggtattccacgcatctatgtatcagccaacagtggagcaagaatcggactggcagaagaaattcgccatatgtttcatgtggcctgggtagatcctgaggatccttacaagggatacaggtatttatatctgactcctcaagattataagagagtcagtgctctcaactctgtccattgtgaacacgtggaagatgaaggagaatccaggtacaagataacagatattattgggaaagaagagggaattggacccgagaaccttcgaggttctggaatgattgctggagaatcctcattggcctataatgagatcattaccatcagcctggtgacgtgccgggccattgggattggggcttaccttgtccggctgggacagagaaccatccaggttgagaattctcacttaattctaacaggagctggagccctcaacaaagtcctcgggcgggaagtgtacacctccaataaccagctggggggcatccagattatgcacaacaatggggtgacccactgcactgtgtgtgatgactttgaaggggttttcactgtcctgcactggctgtcttacatgcccaagagcgtgcacagttcagttcctcttctgaactcaaaggatcctatagacagaatcatcgagtttgttcccacaaagaccccatacgatcctcgatggatgctagcaggccgtcctcacccaacccaaaaaggtcagtggttgagtggcttttttgactatggatctttctcagagattatgcagccctgggcacagactgtggtggttggtagagccaggctaggaggaatacctgtgggagttgttgctgtagaaacccgaacagtagaactaagtatcccagctgatccagcaaacctggattctgaagccaagataatccagcaggctggccaggtttggttcccagattctgcgtttaagacgtatcaggccatcaaggacttcaaccgggaagggctgcctctgatggtctttgccaactggagaggcttctctggtggaatgaaagatatgtacgaccaagtgctgaagtttggtgcttacattgtggatggcttgagggagtgctgccagcctgtgctggtttacattcctccccaggctgagctgcggggtggctcctgggtggtgattgactcctccatcaacccccggcacatggagatgtatgctgaccgagaaagcaggggatctgttctggagccagaagggacagtagaaatcaaattccgcagaaaggatctggtgaaaaccatgcgtcgggtggacccagtctacatccacttggctgagcgattggggaccccagagctaagcacagctgagcggaaggagttggagaacaagttgaaggagcgggaggaattcctaattcccatttaccatcaggtagccgtgcagtttgctgacttgcacgacacaccaggccggatgcaggagaagggtgttattagcgatatcctggattggaaaacatcccgtaccttcttctactggcggctgaggcgtcttctgctggaggacctggtcaagaagaaaatccacaatgccaaccctgagctgactgatggccagattcaagccatgttaaggcgctggtttgtggaagtggaaggaacagtgaaggcttatgtttgggacaataataaggatctggcggagtggctagagaaacagctgacagaggaggatggtgttcactcggtaatagaggaaaacatcaaatgcatcagcagagactacgtcctcaagcaaatccgcagcttggtccaggccaatccagaggttgccatggattccatcatccatatgacgcagcacatatcacccactcagcgagcagaagtcatacggatcctctccacaatggattccccttccacgtaggaagagcttcctgcctgtccctgccctgtctctggagaaaagggctagagctgccttttacaactgtaaccactgtaatgagaaggcacaggagacccagcactggagtcaaatggcattttacttcctctcgtttcaggttatgcatgacatcctgggatgtaagatcacagaatccccctccagcccaccagtcacacctaccccattcagtatttattaccctggccaggcctagtcctccactccctgcacaggactgagaaggcaatgaaaggtacaaacatgtaccatgaggtcttactaaccaaagtagggctgcccctcctgtcctgacagccccttggcctcccagcatggggaagcgtgaggagttgcccagcagtgagcagcccccctcactcctggccccatgagccgcagccacaggcagcagaggagggctaaggagaggaggaagcctcaagtccattgtttattaccccgactcttagcccagcacacagtaggcactggagaggaatgattcccagtttaaccacactacggtaccttttatgaagaaaaattagagcataaaatctactacaagctccataggaactcaaagatgagggcaaaactgtgagccaagaagcagagaaagaaaatagaaccagttattcttgatttaggggacctcaaccttgggttcagtctctgaggacaaagggaaaggtagttgttggcctgcctctcgcctgcacgtcactgctggactagctgtcgcatgtggctgggagctgcaaggccagtgcttgaggggccccagcagttccacaggtggtgaagcctgagttggcagaggaggagccagaagagaactgccctttctgcactggtggaaactagttatttatgccatgtggagagccagtgagatagatagatagtctgtttgttttgaggacttggaaagttgttcctatgaagcctggagcttggatggttttgagaggttaatggtgcctccacactcactcttccctagttccaggattactgtcctagcagctaacggttctactctcttccccagagtgtagacaggcagcaggtctccccacagctctgaaaggaccctggtgacagctacaccctcagcaccaggagctggccttcctgatgagggaggcttccaggaaacacagaatccacatgaccttaagattatttacaactcagtcatggtgctgctgtcctccaggcttactggcccctcctgactggcatcaggggcttcctcaggtggtggagagagtttactttcaacaactagtttattcaagaaaagaacttactgattcctctgttcctaaagcaagagtggcaggtgatcagggctggtgtagcatccggttcctttagtgcagctaactgcatttgtcactgatgaccaaggaggaaatcactaagacatttgagaagcagtggtatgaacgttcttggacaagccacagttctgagccttaaccctgtagtttgcacacaagaacgagctccacctccccttcttcaggaggaatctgtgcggatagattggctggacttttcaatggttctgggttgcaggtgggcactgtatggctgggtatggagcggacagcccccaggagtcagagcctcagcccggctgccctggtggaaggtacaggtgttcagcaccttcagaaaagggcataaagtggtgggggacaattctcagtccaggaaaatgcattgaccattgctggctatttgcttacctagtaagaattggattcatttttgaccagattattcttctatgcttttttgcaataaatcaaatcccacatatctacaagtggtatgaagtcctgcaccccccaggaggcctgtccaggcatgtcttcagaggcagggtgggttacactcatttacctcccctctccccaccaaattatgacacaaacgagtatgtttcctctctagaaccctgtaatgcctcctcccccatccccagagctccttactgtaggtcttaccctggacaaggattttttcaagttggaggcacagaacatgagcaatctgacattcccacagcccctcaaacatgcaaggctactaaggcaggaggagtataaatgatggatattgaccaagacctgcttggacggagaccgccatattatctgttctcttcgttcacaaaacagccttcacttgtctcagaatttgatggacacatactgtgatgagcaggagcttcagatgcactctttacacattttgttgaaataaacctctacatttgtagaagaaaaaaaaaaaaaaaaaaaaaaaaaaaaaa

SEQ ID NO: 229 - RNA, 9054 nt, Mus musculus
  source 1..9054: mol_type = mRNA
ctctgagagcttattttgaaagaataatggatgaaccatctccgttggccaaaactctggagctaaaccagcactcccgattcataattgggtctgtgtctgaagacaactcagaagatgagatcagtaacctggtgaagctggacctagaagagaaggagggctccctgtcaccagcctccgtcagctcagatacactttctgatttggggatctctggcttacaggatggtttggcctttcacatgagatccagcatgtctggcttgcacctagtaaaacaaggtcgagacagaaagaaaatagactcacaacgagatttcactgtggcttctccagcagaatttgttactcgttttgggggaaataaagtaattgagaaggttcttatcgccaacaatggtattgcagcagtgaaatgcatgcgatctatccgtcggtggtcttatgaaatgtttcgaaatgaacgtgcaatccgatttgttgtcatggttacacctgaagaccttaaagccaatgcagaatacattaagatggcagaccactatgttccagtgcctggaggacccaacaacaacaattacgcaaatgtggagttgattcttgatattgctaaaaggatacctgtacaagcagtgtgggctggctggggtcatgcctctgagaacccgaaactcccagaactgctcttaaaaaatggcattgctttcatgggccctccaagccaggccatgtgggctttgggggataagattgcatcttctattgtggctcaaactgcaggtatcccaactcttccctggagtggcagtggtcttcgagtggattggcaagaaaatgatttttcgaaacgtatcttaaatgttccacaggatctgtatgagaaaggctatgtgaaggatgtggatgatggtctgaaggcagctgaggaagttggctatccagtgatgatcaaggcctcagagggaggaggagggaaagggatcagaaaagttaacaatgcagatgacttccctaacctcttcagacaggttcaagctgaagttcctggatcacctatatttgtaatgagactagcaaaacaatctcgacatctggaggtccagattctggcagatcagtatggcaatgctatttctttgtttggtcgtgactgctctgtgcagcgcaggcatcagaagatcattgaagaagctcctgctgcgattgctaccccagcagtatttgaacacatggaacagtgtgcagtgaaacttgccaaaatggttggttatgtgagtgctgggactgtggaatacttgtacagccaggatggaagcttctactttttggaactgaaccctcggctacaggttgaacatccttgtacagagatggtggctgatgtcaatcttcctgcagcacagctccagattgccatggggatccctctatttaggatcaaggatattcgtatgatgtatggggtatctccttggggagatgctcccattgattttgaaaattctgctcatgttccttgcccaaggggccacgtgattgctgctcggatcaccagtgaaaacccagatgaggggtttaagcccagctctggaacagttcaggaacttaattttcgtagcaataagaacgtttggggttatttcagtgttgctgctgctggaggacttcatgaatttgctgattctcagttcgggcactgcttttcctggggagaaaacagggaggaagcaatctcaaatatggtggtggcactgaaggagctgtctattcggggtgactttcgaactacagtggaatacctcatcaaactgctggagacagaaagctttcagcttaacagaatcgacactggctggctggacagactgatcgcagagaaagtgcaggcagagcgacctgacaccatgttgggagttgtgtgtggggctctccatgtagcagatgtgagcctgaggaacagcatctctaacttccttcactccttagagaggggtcaagtccttcctgctcacacacttctgaacacagtagatgttgaacttatctatgaaggaatcaaatatgtacttaaggtgactcggcagtctcccaactcctacgtagtgataatgaatggctcgtgtgtggaagtggatgtgcatcggctgagtgatggtggcctgctcttgtcttatgacggcagcagttacaccacatacatgaaggaagaggtggacagatatcgaatcacaattggcaataaaacctgtgtgtttgagaaggaaaatgacccatctgtaatgcgctcaccgtctgctgggaagttaatccagtatattgtggaagatggcggacatgtgtttgctggccagtgctatgctgagattgaggtaatgaagatggtgatgactttaacagctgtagaatctggctgcatccattatgtcaaacgacctggagcagcacttgaccctggctgtgtgatagccaaaatgcaactggacaaccccagtaaagttcaacaggctgagcttcacacgggcagtctaccacagatccagagcacagctctcagaggcgagaagctccatcgagttttccactatgtcctggataacctggtcaatgtgatgaatggatactgccttccagaccctttcttcagcagcagggtaaaagactgggtagaaagattgatgaagactctgagagacccctccttgcctctgctagagctgcaggatatcatgaccagtgtctctggccggatccccctcaatgtggagaagtctattaagaaggaaatggctcagtatgctagcaacatcacatcagtcctgtgtcagtttcccagccagcagattgccaacatcctagatagtcatgcagctacactgaaccggaaatctgagcgggaagtcttcttcatgaacacccagagcattgtccagctggtgcagaggtaccgaagtggcatccgtggccacatgaaggctgtggtgatggatctgctgcggcagtacctgcgagtagagacacagtttcagaacggccactacgacaaatgtgtattcgcccttcgggaagagaacaaaagcgacatgaacaccgtactgaactacatcttctcccacgctcaggtcaccaaaaagaatctcctggtgacaatgcttattgatcagttatgtggccgggaccctacacttactgatgagctgctaaatatcctcacagagctaacccaactcagcaagaccaccaacgctaaagtggcgctgcgcgctcgtcaggttcttattgcttcccatttgccatcatatgagcttcgccataaccaagtagagtctatcttcctatcagccattgacatgtatggacaccagttttgcattgagaacctgcagaaactcatcctctcggaaacatctattttcgatgtcctcccaaactttttttaccacagcaaccaggtggtgaggatggcagctctggaggtgtatgttcgaagggcttacattgcctatgaactcaacagcgtacaacaccgccagcttaaggacaacacctgtgtggtggaatttcagttcatgctgcccacatcccatccaaacagagggaacatccccacgctaaacagaatgtcctttgcctccaacctcaaccactatggcatgactcatgtagctagtgtcagcgatgttctgttggacaacgccttcacgccaccttgtcagcggatgggcggaatggtctctttccggacctttgaagattttgtcaggatctttgatgaaataatgggctgcttctgtgactccccaccccaaagccccacattcccagagtctggtcatacttcgctctatgatgaagacaaggtccccagggatgaaccaatacatattctgaatgtggctatcaagactgatggcgatattgaggatgacaggcttgcagctatgttcagagagttcacccagcagaataaagctactttggttgagcatggcatccggcgacttacgttcctagttgcacaaaaggatttcagaaaacaagtcaactgtgaggtggatcagagatttcatagagaattccccaaatttttcacattccgagcaagggataagtttgaggaggaccgcatttatcgacacctggagcctgctctggctttccagttagagttgaaccggatgagaaattttgaccttactgccatcccatgtgctaatcacaagatgcacctgtaccttggggctgctaaggtggaagtaggcacagaagtgactgactacaggttctttgttcgtgcgatcatcaggcactctgatctggtcacaaaggaagcttctttcgaatatctacaaaatgaaggggaacgactgctcctggaagctatggatgaattggaagttgcttttaataatacaaatgtccgcactgactgtaaccacatcttcctcaactttgtgcccacggtcatcatggacccatcaaagattgaagaatctgtgcggagcatggtaatgcgctatggaagtcggctatggaaattgcgggtcctccaggcagaactgaaaatcaacattcgcctgacaacaactggaaaagcaattcccatccgcctcttcctgacaaacgagtctggctactacttggacatcagcctgtataaggaagtgactgactccaggacagcacagatcatgtttcaggcatatggagacaagcagggaccactgcatggaatgttaattaatactccatatgtgaccaaagaccttcttcaatcaaagaggttccaggcacagtccttaggaacaacatatatatatgatatcccagagatgtttcggcagtcactcatcaaactctgggagtccatgtccacccaagcatttcttccttcgcctcctttgccttccgacatcctgacgtatactgaactggtgttggatgatcaaggccagctggtccatatgaacagacttccaggaggaaatgagattggcatggtagcctggaaaatgagccttaaaagccctgaatatccagatggccgagatatcattgtcatcggcaatgacattacatatcggatcggttcctttgggcctcaggaggatttgctgtttctcagagcttctgaacttgccagagcagaaggcatcccacgcatctacgtggcagcgaacagtggagctagaattggacttgcagaagaaatacgccatatgttccatgtggcctgggtagatcctgaagatccctacaagggatacaagtatttatatctgacaccccaggattataagagagtcagtgccctcaattctgtccactgtgaacatgtggaggatgaaggggaatccaggtacaagataacagatattatcgggaaagaagaaggacttggagcagagaaccttcggggttctggaatgattgctggggaatcctcattggcttacgatgaggtcatcaccatcagcctggttacatgccgggccattggtattggggcttaccttgtccggctgggacaaagaaccatccaggttgagaattctcacttaattctgacaggagcaggtgccctcaacaaagtccttggtcgggaagtatacacctccaacaaccagcttgggggcatccagattatgcacaacaatggggttacccactccactgtttgtgatgactttgagggagtcttcacagtcttacactggctgtcatacatgccgaagagcgtacacagttcagttcctctcctgaattccaaggatcctatagatagaatcatcgagtttgttcccacaaaggccccatatgatcctcggtggatgctagcaggccgtcctcacccaacccagaaaggccaatggttgagtgggttttttgactatggatctttctcagaaatcatgcagccctgggcacagaccgtggtagttggcagagccaggttagggggaatacccgtgggagtagttgctgtagaaacccgaacagtggaactcagtatcccagctgatcctgcgaacctggattctgaagccaagataatccagcaggccggccaggtttggttcccagactctgcatttaagacctatcaagctatcaaggactttaaccgtgaagggctacctctaatggtctttgccaactggagaggtttctctggtgggatgaaagatatgtatgaccaagtgctcaagtttggcgcttacattgtggatggcttgcgggaatgttcccagcctgtaatggtttacatcccgccccaggctgagcttcggggtggttcttgggttgtgatcgaccccaccatcaaccctcggcacatggagatgtacgctgaccgagaaagcaggggatctgttctggagccagaagggacagtagaaatcaaattccgtaaaaaggatctggtgaaaaccatgcgtcgggtagatccagtttacatccgcttggctgagcgattgggcaccccagagctaagccccactgagcggaaggagctggagagcaagttgaaggagcgggaggagttcctaattcccatttaccatcaggtagctgtgcagtttgctgacttgcacgacacaccaggccggatgcaggagaagggtgtcattaacgatatcttggattggaaaacatcccgcaccttcttctactggaggctgaggcgcctcctgctggaggacctggtcaagaagaaaatccacaatgccaaccctgagctgactgacggccagatccaggccatgttgagacgctggtttgtagaagttgaaggcacagtgaaggcttacgtctgggacaataataaggacctggtggagtggctggagaagcaactgacagaggaagatggcgtccgctctgtgatagaggagaacatcaaatacatcagcagggactatgtcctgaagcagatccgcagcttggtccaggccaacccagaagtcgccatggactccatcgtccacatgacccagcacatctcacccacccagcgagcagaagttgtaaggatcctctccactatggattccccttccacgtaggaggagcttcccgcccacccctgccctgtctctggagaagagagtcgggctgcctctcccatctgagaccactgtaatgagaaggcaccggaggcctgagactggatcagtggcatttgcttcccttgagtgtttcaggctctgcatgacatcctgggctataggatcacacagcccagtcacacatacccgattcagtatttattagcccagctatgatgacagtcctcttcccatgcacaggactgagaaggcaatgaaaggtacttgcctgtaccatgaggtcttactagactaaagcaggactgccctccgtcctgcctgccccagcatagggtcgtgtgaacagtgtccaagtgtctgcagcccctgccccatgagccacagccaacaggggagggctggggctgccaggagacgcaagtccatcgatcactaccccacattgcaaccaagcacatgccaggcactggagagagacagtcccatctaaccacagcaagataactgagaaatgtcagagcagaaaatctgtcgcaagcccgtgagaacacagagataaaggcaaagccatgatctaacaggcaggctcaaaaccagatcatgtcattgttcctggtcaaacacactcaaccacctcagtggcgtctcagtatccctggggagacggtcaccctgccaccaccttatcactatgtaatcacatagtgactatacctaggagctaaaggcctgtgcataagggccctagcctctgcgggtggatggagacaggcaggcagtgcaggagcctgaggtggctaagaggaggctcttttctgttggtgataggggaagagtacttcaaaacaggagaagtctcttctggggacaggttgtcactatggggccatgcctattcctggcagaaggtatggcgggtcacccacctgatgacacctgtgctttcagcaccagaaactggccttcttgatgttaggaggcttccagggaacaagaattcacctgcccttaagataccttacagttcagtctcggtgctggtgtttccagacttctgggccctatgtggccagcaacacggcttcctcaggggtggcctgaaaagtttaactacccatttgtccaagaaagcagctgatggttcagcatttgtgttcataaagcaagaatgaagatgatcataactcgtataacatccagtttcaactttatgactaatacatctgtcgctgaagatcgagaaggaaaaagatacctgccacagaaaccattcaagtgagtacttcagtctgagccttaacctggattccacgaaaagagctgacctccccttcaggagcacctcaagcagatattccagaggaccttctcaatggtgccacattgcaagtggacatccaagggactatagatgcaagttgccccacccccacaagccctggtggaaggaacaggagggccagagctggatcaggtggggagcatccttagtccagaaggaagctccctggcccctggttccctgcttacctggtaggtaaggatgggatttatctctggcctccacttttgctacagcacgtccaatcccacacccccggtggtatgaaagctgctttcctggagaggtggagtgggctgggcttgtataagtcccttttccctgctgccccatccccgggaccgggccgtctcaatacggagaagtcagagccacggcacatgggcagtgtgatggtaccacagcccattacacatgcagggttactgaggaggagggtgaatgatgtattgacccagactggcttgaactgagattgccatattatctgtccacttgttcacaaagcagccttcacacgtgtcagtgagagttcgatggacacacacgccagcgagcaggggcttcagtccaatgcactcttctcacgttttgttgaaataaacctccacatttgtagaagaaaaaaaaaaaaaaaaaaaaaaa

SEQ ID NO: 230 - RNA, 9260 nt, Homo sapiens
  source 1..9260: mol_type = mRNA
attttctgaatggtcttgcttctttgtctatcttgtctgattttctcctgtctgaccttttcctggttaaaaatctgggggaaaatgacggactccaagccgatcaccaagagtaaatcagaagcaaacctcatcccgagccaggagccctttccagcctctgataactcaggggagacaccgcagagaaatggggagggccacactctgcccaagacacccagccaggccgagccagcctcccacaaaggccccaaagatgccggtcggcggagaaactccctaccaccctcccaccagaagcccccaagaaaccccctttcttccagtgacgcagcaccctccccagagcttcaagccaacgggactgggacacaaggtctggaggccacagataccaatggcctgtcctcctcagccaggccccagggccagcaagctggctccccctccaaagaagacaagaagcaggcaaacatcaagaggcagctgatgaccaacttcatcctgggctcttttgatgactactcctccgacgaggactctgttgctggctcatctcgtgagtctacccggaagggcagccgggccagcttgggggccctgtccctggaggcttatctgaccacaggtgaagctgagacccgcgtccccactatgaggccgagcatgtcgggactccacctggtgaagaggggacgggaacacaagaagctggacctgcacagagactttaccgtggcttctcccgctgagtttgtcacacgctttgggggggatcgggtcatcgagaaggtgcttattgccaacaacgggattgccgccgtgaagtgcatgcgctccatccgcaggtgggcctatgagatgttccgcaacgagcgggccatccggtttgttgtgatggtgacccccgaggaccttaaggccaacgcagagtacatcaagatggcggatcattacgtccccgtcccaggagggcccaataacaacaactatgccaacgtggagctgattgtggacattgccaagagaatccccgtgcaggcggtgtgggctggctggggccatgcttcagaaaaccctaaacttccggagctgctgtgcaagaatggagttgctttcttaggccctcccagtgaggccatgtgggccttaggagataagatcgcctccaccgttgtcgcccagacgctacaggtcccaaccctgccctggagtggaagcggcctgacagtggagtggacagaagatgatctgcagcagggaaaaagaatcagtgtcccagaagatgtttatgacaagggttgcgtgaaagacgtagatgagggcttggaggcagcagaaagaattggttttccattgatgatcaaagcttctgaaggtggcggagggaagggaatccggaaggctgagagtgcggaggacttcccgatccttttcagacaagtacagagtgagatcccaggctcgcccatctttctcatgaagctggcccagcacgcccgtcacctggaagttcagatcctcgctgaccagtatgggaatgctgtgtctctgtttggtcgcgactgctccatccagcggcggcatcagaagatcgttgaggaagcaccggccaccatcgccccgctggccatattcgagttcatggagcagtgtgccatccgcctggccaagaccgtgggctatgtgagtgcagggacagtggaatacctctatagtcaggatggcagcttccacttcttggagctgaatcctcgcttgcaggtggaacatccctgcacagaaatgattgctgatgttaatctgccggccgcccagctacagatcgccatgggcgtgccactgcaccggctgaaggatatccggcttctgtatggagagtcaccatggggagtgactcccatttcttttgaaaccccctcaaaccctcccctcgcccgaggccacgtcattgccgccagaatcaccagcgaaaacccagacgagggttttaagccgagctccgggactgtccaggaactgaatttccggagcagcaagaacgtgtggggttacttcagcgtggccgctactggaggcctgcacgagtttgcggattcccaatttgggcactgcttctcctggggagagaaccgggaagaggccatttcgaacatggtggtggctttgaaggaactgtccatccgaggcgactttaggactaccgtggaatacctcattaacctcctggagaccgagagcttccagaacaacgacatcgacaccgggtggttggactacctcattgctgagaaagtgcaggcggagaaaccggatatcatgcttggggtggtatgcggggccttgaacgtggccgatgcgatgttcagaacgtgcatgacagatttcttacactccctggaaaggggccaggtcctcccagcggattcactactgaacctcgtagatgtggaattaatttacggaggtgttaagtacattctcaaggtggcccggcagtctctgaccatgttcgttctcatcatgaatggctgccacatcgagattgatgcccaccggctgaatgatggggggctcctgctctcctacaatgggaacagctacaccacctacatgaaggaagaggttgacagttaccgaattaccatcggcaataagacgtgtgtgtttgagaaggagaacgatcctacagtcctgagatccccctcggctgggaagctgacacagtacacagtggaggatgggggccacgttgaggctgggagcagctacgctgagatggaggtgatgaagatgatcatgaccctgaacgttcaggaaagaggccgggtgaagtacatcaagcgtccaggtgccgtgctggaagcaggctgcgtggtggccaggctggagctcgatgacccttctaaagtccacccggctgaaccgttcacaggagaactccctgcccagcagacactgcccatcctcggagagaaactgcaccaggtcttccacagcgtcctggaaaacctcaccaacgtcatgagtggcttttgtctgccagagcccgtttttagcataaagctgaaggagtgggtgcagaagctcatgatgaccctccggcacccgtcactgccgctgctggagctgcaggagatcatgaccagcgtggcaggccgcatccccgcccctgtggagaagtctgtccgcagggtgatggcccagtatgccagcaacatcacctcggtgctgtgccagttccccagccagcagatagccaccatcctggactgccatgcagccaccctgcagcggaaggctgatcgagaggtcttcttcatcaacacccagagcatcgtgcagttggtccagagataccgcagcgggatccgcggctatatgaaaacagtggtgttggatctcctgagaagatacttgcgtgttgagcaccattttcagcaagcccactacgacaagtgtgtgataaacctcagggagcagttcaagccagacatgtcccaggtgctggactgcatcttctcccacgcacaggtggccaagaagaaccagctggtgatcatgttgatcgatgagctgtgtggcccagacccttccctgtcggacgagctgatctccatcctcaacgagctcactcagctgagcaaaagcgagcactgcaaagtggccctcagagcccggcagatcctgattgcctcccacctcccctcctacgagctgcggcataaccaggtggagtccattttcctgtctgccattgacatgtacggccaccagttctgccccgagaacctcaagaaattaatactttcggaaacaaccatcttcgacgtcctgcctactttcttctatcacgcaaacaaagtcgtgtgcatggcgtccttggaggtttacgtgcggaggggctacatcgcctatgagttaaacagcctgcagcaccggcagctcccggacggcacctgcgtggtagaattccagttcatgctgccgtcctcccacccaaaccggatgaccgtgcccatcagcatcaccaaccctgacctgctgaggcacagcacagagctcttcatggacagcggcttctccccactgtgccagcgcatgggagccatggtagccttcaggagattcgaggacttcaccagaaattttgatgaagtcatctcttgcttcgccaacgtgcccaaagacacccccctcttcagcgaggcccgcacctccctatactccgaggatgactgcaagagcctcagagaagagcccatccacattctgaatgtgtccatccagtgtgcagaccacctggaggatgaggcactggtgccgattttacggacattcgtacagtccaagaaaaatatccttgtggattatggactccgacgaatcacattcttgattgcccaagagaaagaatttcccaagtttttcacattcagagcaagagatgagtttgcagaagatcgcatttaccgtcacttggaacctgccctggccttccagctggaacttaaccggatgcgtaacttcgatctgaccgccgtgccctgtgccaaccacaagatgcacctttacctgggtgctgccaaggtgaaggaaggtgtggaagtgacggaccataggttcttcatccgcgccatcatcaggcactctgacctgatcacaaaggaagcctccttcgaatacctgcagaacgagggtgagcggctgctcctggaggccatggacgagctggaggtggcgttcaataacaccagcgtgcgcaccgactgcaaccacatcttcctcaacttcgtgcccactgtcatcatggaccccttcaagatcgaggagtccgtgcgctacatggttatgcgctacggcagccggctgtggaaactccgtgtgctacaggctgaggtcaagatcaacatccgccagaccaccaccggcagtgccgttcccatccgcctgttcatcaccaatgagtcgggctactacctggacatcagcctctacaaagaagtgactgactccagatctggaaatatcatgtttcactccttcggcaacaagcaagggccccagcacgggatgctgatcaatactccctacgtcaccaaggatctgctccaggccaagcgattccaggcccagaccctgggaaccacctacatctatgacttcccggaaatgttcaggcaggctctctttaaactgtggggctccccagacaagtatcccaaagacatcctgacatacactgaattagtgttggactctcagggccagctggtggagatgaaccgacttcctggtggaaatgaggtgggcatggtggccttcaaaatgaggtttaagacccaggagtacccggaaggacgggatgtgatcgtcatcggcaatgacatcacctttcgcattggatcctttggccctggagaggaccttctgtacctgcgggcatccgagatggcccgggcagagggcattcccaaaatttacgtggcagccaacagtggcgcccgtattggcatggcagaggagatcaaacacatgttccacgtggcttgggtggacccagaagacccccacaaaggatttaaatacctgtacctgactccccaagactacaccagaatcagctccctgaactccgtccactgtaaacacatcgaggaaggaggagagtccagatacatgatcacggatatcatcgggaaggatgatggcttgggcgtggagaatctgaggggctcaggcatgattgctggggagtcctctctggcttacgaagagatcgtcaccattagcttggtgacctgccgagccattgggattggggcctacttggtgaggctgggccagcgagtgatccaggtggagaattcccacatcatcctcacaggagcaagtgctctcaacaaggtcctgggaagagaggtctacacatccaacaaccagctgggtggcgttcagatcatgcattacaatggtgtctcccacatcaccgtgccagatgactttgagggggtttataccatcctggagtggctgtcctatatgccaaaggataatcacagccctgtccctatcatcacacccactgaccccattgacagagaaattgaattcctcccatccagagctccctacgacccccggtggatgcttgcaggaaggcctcacccaactctgaagggaacgtggcagagcggattctttgaccacggcagtttcaaggaaatcatggcaccctgggcgcagaccgtggtgacaggacgagcaaggcttggggggattcccgtgggagtgattgctgtggagacacggactgtggaggtggcagtccctgcagaccctgccaacctggattctgaggccaagataattcagcaggcaggacaggtgtggttcccagactcagcctacaaaaccgcccaggccgtcaaggacttcaaccgggagaagttgcccctgatgatctttgccaactggagggggttctccggtggcatgaaagacatgtatgaccaggtgctgaagtttggagcctacatcgtggacggccttagacaatacaaacagcccatcctgatctatatcccgccctatgcggagctccggggaggctcctgggtggtcatagatgccaccatcaacccgctgtgcatagaaatgtatgcagacaaagagagcaggggtggtgttctggaaccagaggggacagtggagattaagttccgaaagaaagatctgataaagtccatgagaaggatcgatccagcttacaagaagctcatggaacagctaggggaacctgatctctccgacaaggaccgaaaggacctggagggccggctaaaggctcgcgaggacctgctgctccccatctaccaccaggtggcggtgcagttcgccgacttccatgacacacccggccggatgctggagaagggcgtcatatctgacatcctggagtggaagaccgcacgcaccttcctgtattggcgtctgcgccgcctcctcctggaggaccaggtcaagcaggagatcctgcaggccagcggggagctgagtcacgtgcatatccagtccatgctgcgtcgctggttcgtggagacggagggggctgtcaaggcctacttgtgggacaacaaccaggtggttgtgcagtggctggaacagcactggcaggcaggggatggcccgcgctccaccatccgtgagaacatcacgtacctgaagcacgactctgtcctcaagaccatccgaggcctggttgaagaaaaccccgaggtggccgtggactgtgtgatatacctgagccagcacatcagcccagctgagcgggcgcaggtcgttcacctgctgtctaccatggacagcccggcctccacctgaccgtggcccgcccagccactcccgggaccacggcaaaaggaaccacccagacccaccacccgtacaccctcagcagaccctgaagacttgcttttaaacaaagaaaatcctgggcacttctgcagggctgctggttccgagctgacacccgtcttaacaaaaggcccaggagtgcctcttccaaacaaaaacagcctcctctccatagctgggaagtttattttgttttgtctctgaagacagcagttttattgcatcactaaatctaatcaagctaaaacatccctgtttccttttgcaaaacagtgcctggcatgtgggatccaggcgttctttaggatccttggataccacatcgtgaaatcttttatttttttactctgagaccagcaccagatgtaagtaagcatctcatatatttcagccaaataaatgggccaagggaaaaaaatatatatatatagacaggactagagaaaacctatttttgtaatgatgtttctttggatactgtctagtcacccagaaaaatgtatggatgaatttttttttttttttttgagacaaagtctcactgtgtcatgcaggctggagtgcagtggcatgatctcactgcaacctccatctcctgtctcagcctcctagataactgggattacaggtgcccaccaccatgcccggctaatttttgtatttttggtagagacagagtttcaccaggttggtcaggctggtctcaaactcttgacttcaggtaatccacccaccttggcctcccaaagtgctgggattacaggcatgagccaccatcttcagccagatgatttttttattgagagagtgaaatgctattttgttccccaaatggcgctagtgaatcactaggagggtcccactgataggccatgtttagcactggttgccagggattctctttttgagagagggaaagcaaaatgaatggaagtacccagctggaggtttcagggcttctggaggatgctctcgcatagctcgaggtcctctgcccacctcttctctccaaggaaaatgaggactgccccttccccctgcaggattggcccccagcctgcgcatgcaccctcctcttgcccaagtggggagcacagaggcggagaggaatcccttaccacacccacggcccagcttgctcacgagtgtcacctctgtgacggtcaccactgctcccttggagggccacttgagttactgttgcttcctcgcctgctggcttgatgagcaccgatggtgggatctgaccccgaggggcagagctgtcggtgactgaggactggactgtggtgaccatgccgatttgctcagggagaacgttgcaatgcacccagcagctcctggctctgcaggcggcacagcctggggccctgtgatcctctggtttcttccattggggcggagtcggggatggagggagctggccacaacccactgctctgatgggtggtttgtccaaggatgctgaatgtaatgcctggtcaatgtggaagcccatgaggttgcccagggaagcctccaaaagctgggatgcttgagggtatccaagttgaaaaagacaaaatctgaccatcagccagtgacagtcctggcaaatgaaggtggggcggggcagtgaggggtgggagaaggtgaatgattcattattccaccccgaggtttgctggggtgaggggaagaatcgatgctgctttgggaactgaaggtttttctgttgggaaggccctcttggttttggagagaaagacaagttatgagtagctgctaccctggaacggtgggcagagagcctactaggaaatgtgcagaataaactattttttgaaggaaaaaaaaaaaaa

SEQ ID NO: 231 - RNA, 8497 nt, Mus musculus
  source 1..8497: mol_type = mRNA
atggtcttgcttctctttctgacttgcctggttttctcctgcctgaccttttcctggctaaaaatctgggggaagatgacagactcgaagccgctcaccaacagtaaggtggaagccaatctcctttcaagcgaggagtccctttcagcctcagagctgtcaggggaacagctgcaggaacatggcgaccacagctgtctgtcctacagaggtcccagagacgccagtcagcagaggaactccctgccaagctcatgccagaggcctccgaggaacccactgtcttccaatgacacctggccctccccagaactccaaaccaactggacagccgccccgggcccagaggttccagatgctaatgggttgtccttcccagccaggcccccgagccagaggacagtatccccctccagagaggacaggaagcaggcacacatcaagagacagctgatgaccagctttatcctgggctccctggatgacaactcctctgatgaggaccctagtgccggctccttccagaactcctcccggaagagcagcagggctagcctgggcactctgtcccaggaggctgcattgaacacaagtgatcctgaatctcacgcgcctactatgaggcccagcatgtctggactccatctggtgaagagaggccgagaacacaagaaactggacctgcacagagatttcaccgtcgcgtccccagccgagtttgtcactcggtttggaggcaacagggtcatagagaaggtgctcatcgccaacaatggcatcgctgcggtcaagtgtatgcgctccatccgccgctgggcctacgagatgttccgtaatgaacgtgccatccggttcgtggtcatggtgacgcccgaggatctgaaggccaacgcagagtacatcaagatggccgatcagtacgtccctgtcccaggaggacccaataacaacaactatgccaatgttgagctgatcatagacattgccaagagaatccctgtacaggccgtgtgggctggctggggccacgcttcggaaaaccccaaacttccagagctgctgtgtaaacacgagattgctttcctaggtccccccagtgaggccatgtgggccctgggagacaagatcgcctccaccatcgtagcgcagacactgcaaatcccaaccttaccctggagtggaagcggtctcacagtggagtggacggaggacagccggcaccagggcaaatgcatcagtgtccccgaagacgtttacgagcagggctgtgtgaaggatgtggacgaaggcttgcaggcagcagaaaaaataggatttcctttgatgatcaaagcctccgaaggcggaggcgggaaaggtatccgcaaggctgagagtgcagaggacttcccgatgcttttccgacaagtgcagagtgagattccgggctcgccgatctttctaatgaagctggcccagaacgcacggcacctggaggtccaggtcttggcagatcagtatggaaacgcggtgtcactgttcggacgggactgttccattcagaggcggcaccagaagatcattgaggaggctccggccaccatcgccgcgcctgccgtgtttgagttcatggaacagtgtgctgtcctcctggccaagatggtgggttatgtgagcgcggggactgtggagtacttatacagccaggatggcagcttccacttcctggagctgaacccacgcctgcaggtggagcatccgtgcactgaaatgatcgcagatgtcaacctgcctgctgcgcagttgcagatcgccatgggcgtgcccctgcaccgactgaaggacatacggcttctgtacggagagtccccctggggagtgacccccattccttttgaaacccccttgagccctcccattgcccgaggccacgtcattgcagccaggatcaccagcgaaaacccagatgagggctttaagccaagctcggggacagtgcaggagctgaacttccgcagcaacaagaacgtgtggggttacttcagcgtggccgctgctgggggcttgcacgagttcgccgattcccagtttgggcactgcttctcctggggcgagaaccgtgaagaggccatttcgaacatggtagtggctttgaaggaactgtccatccggggtgacttccggaccactgtggagtatctcgttaaccttctggagaccgagagcttccagaacaacgatatcgacacggggtggctggaccacctcatcgctcagcgggtgcaggcagagaagccggacatcatgcttggggtggtgtgtggggccttgaatgtggcagacgcgatgttcagaacctgcatgacggaattcttgcactccctggaaaggggtcaggtcctccctgctgattctctgctgaacattgtggacgttgaattgatttacggcggcatcaagtatgctctcaaggtagcccgacagtccctgactatgtttgtcctcatcatgaacggctgccacatcgagatcgatgcccaccggctgaacgatggggggctgctcctgtcctacaatggcagcagttacactacgtacatgaaggaagaggttgacagttaccggatcactatcggcaataagacttgcgtgtttgaaaaggaaaacgaccccactgtcctgagatccccctcggctgggaagctgatgcagtatacggtggaggacggagaccacgtggaagctgggagcagctacgcggagatggaggtgatgaagatgatcatgaccctgaacgtgcaggagagcggccgggtgaagtacatcaagcggccaggggttatactggaggctggctgcgtggtggcgaggctagaactcgatgacccttcaaaagtgcacgcggcccagccgtttactggggagctccctgcccagcagactctgcccatcctcggggagaagctacaccaagtgttccacggcgtcttggaaaatctgaccaatgtcatgagtggctactgcctgcccgagcccttcttcagcatgaagctgaaggactgggtccagaagctcatgatgacgctccggcatccctccctacctctgctggagctacaggagatcatgaccagtgtggccggccgcatccccgccccggtggagaaggcagtccgcagggtgatggcccagtacgccagtaacatcacctccgtgctatgccagttccccagccagcagatagccaccatcctggactgccatgccgccaccctgcagcgtaaggcggaccgagaggtcttcttcatgaacacacagagcatcgtgcagctggtccagagataccgcagcgggacccgtggctacatgaaggctgtggtgctggacctcctgaggaaatatctaaacgtggagcaccattttcagcaagcccactatgacaagtgtgtgatcaacctgagggagcagttcaagccggacatgacccaggtgctggactgcatcttctcacactcccaggtggccaagaagaaccagctggtgaccatgctgatagatgagctgtgcggcccagaccccaccctgtcagacgagctgacctccatcctctgtgagctcacgcagctgagcagaagcgagcactgcaaggttgccctcagagccagacaggtcctgatcgcctcccacctcccctcctacgagctgcggcacaaccaggtggagtccatcttcctgtccgccatcgacatgtacggccaccagttctgcccagaaaatctcaagaaactaatactttcagaaacgaccatattcgacgtcctgcccactttcttctatcacgagaacaaggttgtctgtatggcgtccctggaggtttacgtgcggagaggctacatcgcctacgagctaaacagcctgcagcaccgggagctcccagatggcacctgtgtggtggagttccagttcatgctgccctcttcccaccccaaccggatggccgtgcccatcagtgtctccaaccccgacctgctgaggcacagcacagaactcttcatggacagtggcttctccccactgtgccagcggatgggggccatggtggccttcaggagatttgaagaattcaccaggaactttgatgaagtcatctcctgctttgccaacgtgcagacagacactcttctcttcagtaaggcgtgcacttccctgtactcagaggaagacagcaagagcctccgagaggaacccatccacatcctgaatgtggccatccagtgtgccgaccacatggaggacgaggcgctggtgccagtcttccgtgcctttgtacagtccaagaagcacatccttgtggattacggactccgaagaatcacattccttgttgcccaagagagagaattccccaagttcttcacgttcagagcgagggatgagtttgcagaagaccggatttatcgccacttggagcctgccctggccttccagctggagctgagccggatgcgcaactttgacctgaccgctgtgccctgtgccaaccacaagatgcatctttacctgggagccgctaaggtgaaggaagggttggaggtgaccgaccacaggttctttatccgagccattatccggcactcagacctgatcaccaaggaagcctccttcgagtacctgcagaacgaaggtgagcggctgctgctggaagccatggacgagctggaggtggcgttcaacaacaccagtgtgcgcactgactgcaaccacatcttcctcaactttgtgcccacagtcatcatggacccgctcaagatcgaggagtcggtgcgtgacatggtcatgcgctatggcagccgtctgtggaagctccgagtgctgcaggccgaggttaagatcaacatccgtcagacaacctcagatagtgccatccccatccgcctcttcatcaccaacgagtctggctactacctggacatcagcctctatagagaagtgacggactccagatccggaaatatcatgtttcattcctttggcaacaagcaaggtagcctgcatgggatgctgatcaatacaccctatgtcaccaaggacctgctccaggctaagcgattccaggcacagtccctcgggaccacctatgtgtacgacttcccagagatgttcaggcaggctctctttaaactgtggggctccccagagaagtaccccaaagatatcctgacatacacagagctggtgttggactctcaaggtcagctggtggagatgaaccggcttcctggttgtaacgaggtgggcatggtggccttcaaaatgaggttcaagaccccggagtatccagaaggccgggacgccgttgtcatcggcaatgacatcaccttccaaatcggctctttcggcataggggaggacttcctgtacctgcgagcgtctgagatggcccggacagagggcatcccccaaatctacctggcagctaacagcggggcccgtatgggcctggctgaggagatcaaacagatattccaagtggcttgggtggacccagaggatccccacaaaggatttagatacctgtacctgacgccccaagactacacccagatcagttcccagaactcagtgcactgcaagcacatcgaagatgaaggcgaatccagatacgtcatcgtggatgtcatcgggaaggatgccaacctgggtgtggagaacctgaggggctcgggcatgattgcaggagaagcttccctggcttatgagaaaacggtcaccatcagcatggtgacctgccgcgcccttggaatcggggcttacctggtgaggcttggccagcgggtgatccaggtggaaaactcccacatcatcctcaccggagccggtgctctcaacaaggtcctgggaagagaggtctacacgtccaacaaccagctaggtggcgtgcagatcatgcataccaacggggtctcccacgtcaccgtgccagatgacttcgagggggtctgcaccattctggaatggctgtcatttataccgaaggacaatcgcagcccggtccccatcaccactccttctgaccccatcgacagggaaattgaattcaccccaaccaaagctccctacgaccccaggtggatgcttgcaggcaggcctcacccaactctgaaggggacctggcagagtggattcttcgaccatggcagtttcaaggaaatcatggcaccctgggcccagactgtggtgacgggacgagcaaggctggggggcatccctgtgggagtgattgctgtggagactcggactgtggaggtggctgtccccgctgaccctgccaacttggattctgaggccaagatcatccagcaggcgggccaggtgtggttcccggactcggcctacaagacggcgcaggtcatcagggacttcaacaaggagcgcctgcctctcatgatcttcgccaactggaggggcttctccggaggcatgaaggacatgtatgagcagatgctgaagtttggcgcctacatcgtggatggtctccgcctgtacgagcagcccattctcatctacatccctccctgtgcggagctccgtgggggctcctgggttgtcctggactccaccatcaaccccctgtgcatagagatgtatgcagacaaagagagcagggggggtgttctggagccggagggcacggtggagattaagttccggaagaaagatctggtgaaaaccataaggaggatagacccagtgtgtaagaagctcgtgggacagctggggaaagcccagcttcccgacaaggaccggaaggagctggagggccagctgaaggcccgggaggaactgctgcttcccatctaccaccaggtggcagtgcagttcgcagacctgcacgacaccccgggccacatgctggagaaaggaatcatttctgatgtgctggaatggaagactgcccgcaccttcttctactggaggctgcgccggctgctgctggaggcccaggtgaagcaggagatactccgagccagccccgagctgaaccacgagcacacacagtccatgctgcgacgctggttcgtggagactgagggcgctgtcaaggcctacctgtgggacagcaaccaggtggtggtccagtggctggaacagcactggtcagccaaggacggcttgcgctccaccatccgtgaaaacatcaattatctgaagcgggactctgtcctcaagaccatccaaagtctggtccaagaacatccagaggtcatcatggactgcgtggcctacctgagccagcacctcacgccagccgagcggatacaggtggctcagctgctgtctaccacggagagcccagcttcctcctgatgagcaactctggccatccccaggaccctggacggtgggatggccatgcggcaggccttcgagggacacgggcttattttgggaaaactcacggagccactccaaatgtagctgcggttcctgaccagcgacttctggacagaaggcccctgggcccctgctaaggcgggcccagcctctcctcacctggggacttcagggtttgtcccagtggataattctgccactgcctctctgaggccaactgaaccaggcacaccgagttccttgtggtttttgcctgaggtggggatccggtgtctgatcacaagacacttgttctaccacgttggtttgcactcagctccttgtgtccctcagccgagtaaatgggccaaagagaacgccagatgagacccaagaaaacgtctttttgtgatgaggcttattagacacttagcaagagcaaaaatgatttccttttttgttgttgttgttgtttttcatttaagagaataaagtgacattttattctccaagtggccctagtgagtcaggacaaccatctgtcccattagagaggttctccagagataaaggacaaacagacaggacacctagcattcagcatggctggaggagagttactgcctcggttcccaggctctgtaagccctctcttcccaagtggagcaaggactggacctccgtgcctcctgcagattggccacccacagggtactgagtgccctactgcctgagtgcagagaggctgtccctcacccctcccagaacctctggccaatatacttcctcaccttgtgccttgataccacggcaggagccaacagcgctggaccagtgacccagggctgtgcctcgaacactctggatccgcttacagagactttcccagcactgccaggcaccgcagcatcaggacccgaatgagatgctccggccaggggtggggtggggatgttggggtagtggagaaccccactctgtcgctgcccttcttgggggataaagggttcttctgggcaaggtcctcttgatgtggaggaaagcccagaccgacactggctgccaccctgaccacttgggtgcgctgaagaggctgctgaaagagctgcaaaataaactattttttttgaagaaaaaaaaaaaa

SEQ ID NO: 232 - RNA, 533 nt, Homo sapiens
  source 1..533: mol_type = mRNA
tgctcagttcatccctagaggcagctgctccaggaacagaggtgccatgcagccccgggtactccttgttgttgccctcctggcgctcctggcctctgcccgagcttcagaggccgaggatgcctcccttctcagcttcatgcagggttacatgaagcacgccaccaagaccgccaaggatgcactgagcagcgtgcaggagtcccaggtggcccagcaggccaggggctgggtgaccgatggcttcagttccctgaaagactactggagcaccgttaaggacaagttctctgagttctgggatttggaccctgaggtcagaccaacttcagccgtggctgcctgagacctcaataccccaagtccacctgcctatccatcctgcgagctccttgggtcctgcaatctccagggctgcccctgtaggttgcttaaaagggacagtattctcagtgctctcctaccccacctcatgcctggcccccctccaggcatgctggcctcccaataaagctggacaagaagctgctatg

SEQ ID NO: 233 - RNA, 524 nt, Mus musculus
  source 1..524: mol_type = mRNA
ctgctcagttttatccctagaagcagctagctactccaggtacgtaggtgccatgcagccccggacgctcctcactgtggccctcttggctctcctggcatctgcccgagctgaagaggtagagggatccttgctgctgggctctgtacagggctacatggaacaagcctccaagacggtccaggatgcgctaagtagcgtgcaggagtccgatatagctgtggtggccaggggctggatggacaatcacttcagatccctgaaaggctactggagcaagtttactgacaagttcaccggcttctgggattctaaccctgaggaccaaccaactccagctattgagtcgtgagacttctgtgttgcagatgtgcctgttcctccatcctgctgcccccctccaggcctgccaggtggcccctgaaggttgctttaaggggaaagtatgttctcatgtcttcacccctccctagatctcacctaaacatgctgtccctaataaagctggataagaagctgctgtt

SEQ ID NO: 234 - RNA, 4093 nt, Homo sapiens
  source 1..4093: mol_type = mRNA
tttcgaacccgcaatggaagaaaggggaggggtttatgcggggcggggtctggagttagtgttttgggagtgggaggtagttacagtgatgtctgttttttcccgttcaagaattaagtgtgtacctgcagacgtgtattcattcatatattcttgttctgaagagggtcactccctcactggctgccattgaaagagtccacttctcagtgactcctagctgggcactggatgcagttgaggattgctggtcaatatgattcttcttgctgtgctttttctctgcttcatttcctcatattcagcttctgttaaaggtcacacaactggtctctcattaaataatgaccggctgtacaagctcacgtactccactgaagttcttcttgatcggggcaaaggaaaactgcaagacagcgtgggctaccgcatttcctccaacgtggatgtggccttactatggaggaatcctgatggtgatgatgaccagttgatccaaataacgatgaaggatgtaaatgttgaaaatgtgaatcagcagagaggagagaagagcatcttcaaaggaaaaagcccatctaaaataatgggaaaggaaaacttggaagctctgcaaagacctacgctccttcatctaatccatggaaaggtcaaagagttctactcatatcaaaatgaggcagtggccatagaaaatatcaagagaggtctggctagcctatttcagacacagttaagctctggaaccaccaatgaggtagatatctctggaaattgtaaagtgacctaccaggctcatcaagacaaagtgatcaaaattaaggccttggattcatgcaaaatagcgaggtctggatttacgaccccaaatcaggtcttgggtgtcagttcaaaagctacatctgtcaccacctataagatagaagacagctttgttatagctgtgcttgctgaagaaacacacaattttggactgaatttcctacaaaccattaaggggaaaatagtatcgaagcagaaattagagctgaagacaaccgaagcaggcccaagattgatgtctggaaagcaggctgcagccataatcaaagcagttgattcaaagtacacggccattcccattgtggggcaggtcttccagagccactgtaaaggatgtccttctctctcggagctctggcggtccaccaggaaatacctgcagcctgacaacctttccaaggctgaggctgtcagaaacttcctggccttcattcagcacctcaggactgcgaagaaagaagagatccttcaaatactaaagatggaaaataaggaagtattacctcagctggtggatgctgtcacctctgctcagacctcagactcattagaagccattttggactttttggatttcaaaagtgacagcagcattatcctccaggagaggtttctctatgcctgtggatttgcttctcatcccaatgaagaactcctgagagccctcattagtaagttcaaaggttctattggtagcagtgacatcagagaaactgttatgatcatcactgggacacttgtcagaaagttgtgtcagaatgaaggctgcaaactcaaagcagtagtggaagctaagaagttaatcctgggaggacttgaaaaagcagagaaaaaagaggacaccaggatgtatctgctggctttgaagaatgccctgcttccagaaggcatcccaagtcttctgaagtatgcagaagcaggagaagggcccatcagccacctggctaccactgctctccagagatatgatctccctttcataactgatgaggtgaagaagaccttaaacagaatataccaccaaaaccgtaaagttcatgaaaagactgtgcgcactgctgcagctgctatcattttaaataacaatccatcctacatggacgtcaagaacatcctgctgtctattggggagcttccccaagaaatgaataaatacatgctcgccattgttcaagacatcctacgttttgaaatgcctgcaagcaaaattgtccgtcgagttctgaaggaaatggtcgctcacaattatgaccgtttctccaggagtggatcttcttctgcctacactggctacatagaacgtagtccccgttcggcatctacttacagcctagacattctctactcgggttctggcattctaaggagaagtaacctgaacatctttcagtacattgggaaggctggtcttcacggtagccaggtggttattgaagcccaaggactggaagccttaatcgcagccacccctgacgagggggaggagaaccttgactcctatgctggtatgtcagccatcctctttgatgttcagctcagacctgtcacctttttcaacggatacagtgatttgatgtccaaaatgctgtcagcatctggcgaccctatcagtgtggtgaaaggacttattctgctaatagatcattctcaggaacttcagttacaatctggactaaaagccaatatagaggtccagggtggtctagctattgatatttcaggtgcaatggagtttagcttgtggtatcgtgagtctaaaacccgagtgaaaaatagggtgactgtggtaataaccactgacatcacagtggactcctcttttgtgaaagctggcctggaaaccagtacagaaacagaagcaggcttggagtttatctccacagtgcagttttctcagtacccattcttagtttgcatgcagatggacaaggatgaagctccattcaggcaatttgagaaaaagtacgaaaggctgtccacaggcagaggttatgtctctcagaaaagaaaagaaagcgtattagcaggatgtgaattcccgctccatcaagagaactcagagatgtgcaaagtggtgtttgcccctcagccggatagtacttccagcggatggttttgaaactgacctgtgatattttacttgaatttgtctccccgaaagggacacaatgtggcatgactaagtacttgctctctgagagcacagcgtttacatatttacctgtatttaagatttttgtaaaaagctacaaaaaactgcagtttgatcaaatttgggtatatgcagtatgctacccacagcgtcattttgaatcatcatgtgacgctttcaacaacgttcttagtttacttatacctctctcaaatctcatttggtacagtcagaatagttattctctaagaggaaactagtgtttgttaaaaacaaaaataaaaacaaaaccacacaaggagaacccaattttgtttcaacaatttttgatcaatgtatatgaagctcttgataggacttccttaagcatgacgggaaaaccaaacacgttccctaatcaggaaaaaaaaaaaaaaaaaaagtaagacacaaacaaaccattttttttctctttttttggagttgggggcccagggagaagggacaagacttttaaaagacttgttagccaacttcaagaattaatatttatgtctctgttattgttagttttaagccttaaggtagaaggcacatagaaataacatctcatctttctgctgaccattttagtgaggttgttccaaagacattcaggtctctacctccagccctgcaaaaatattggacctagcacagaggaatcaggaaaattaatttcagaaactccatttgatttttcttttgctgtgtctttttgagactgtaatatggtacactgtcctctaagggacatcctcattttatctcacctttttgggggtgagagctctagttcatttaactgtactctgcacaatagctaggatgactaagagaacattgcttcaagaaactggtggatttggatttccaaaatatgaaataaggaaaaaaatgtttttatttgtatgaattaaaagatccatgttgaacatttgcaaatatttattaataaacagatgtggtgataaacccaaaacaaatgacaggtccttattttccactaaacacagacacatgaaatgaaagtttagctagcccactatttgttgtaaattgaaaacgaagtgtgataaaataaatatgtagaaatcaaaa

SEQ ID NO: 235 - RNA, 4272 nt, Mus musculus
  source 1..4272: mol_type = mRNA
ggtctgggcctgggttttgcgggaatggttagtggctaccgcgaggcgtttttcccggtcaagcgttgcatttctacccacaggcctgtgtaagctcgggtctcgaggcgaagatcgccccactgaaagaaattgaaatgcgaaacagacgaaatgctcttatttttttctgcgttgagaggatgatctagtattgcccaacgtacttctaatttatggtctcactgaatctggagaggaactactggctagacgtgttggccagcaagtccccaggacctcactgcttcttcatattcatctggtttgcagtgttaaccgattaacctgggtcaagaggaaatgacagtcgtgatggggaaatgtcaagtatcagatggacgccagcttttgttattttatgccgtgctgttactctttcctactttgtgtgccatgcaaaatagcggtcacacaactggcctctcattaaataatgagcggctatacaagctcacgtactccactgaagtgtttcttgatgggggcaaaggaaaaccgcaagacagcgtgggctacaaaatctcatctgatgtggacgttgtgttactgtggaggaatcctgatggtgatgatgatcaagtgatccaagtcacgataacagctgttaacgttgaaaatgcgggtcaacagagaggcgagaagagcatcttccagggcaaaagtacacctaagatcatagggaaggacaacctggaggctctgcagagacccatgcttcttcatctggtccgggggaaggtcaaggagttctactcctatgaaaacgagccagtgggcatagaaaatctcaagagaggcttggctagcttattccagatgcagctaagctctggaactaccaacgaggtagatatctctggggattgtaaagtgacctaccaggcccagcaagacaaagtggtcaaaattaaggctctggatacatgcaaaattgagcggtctggatttacaacggcaaaccaggtgctgggtgtcagttcaaaagccacatctgtcactacctacaagatagaggacagctttgtcaccgctgtgcttgcagaagagaccagggcttttgccttgaacttccaacaaaccatagcaggaaaaatagtgtcgaagcagaaattggagctgaagacaactgaagccggcccaaggatgatccccgggaagcaagtggcaggtgtaattaaagcagttgattccaaatacaaagccattcccattgtgggacaggtcctcgagcgtgtctgcaaaggatgcccttctctggcggagcactggaagtccatcagaaagaacctggagcctgaaaacctgtccaaggccgaggccgtccagagcttcctggccttcattcagcacctccggacttcgaggagagaagagatcctccagattctgaaggcagagaagaaagaagtgctccctcagctggtggatgccgtcacctctgctcagactccagactcgctagaagccatcctggactttttggatttcaaaagtgacagcagtatcatactccaggaaaggttcctctatgcctgtggctttgccacccaccctgatgaagaactcctacgagccctccttagtaagttcaaaggttcctttgcaagcaacgacatcagagagtcggttatgatcatcattggagccctggtcaggaagctgtgtcagaatgaaggctgcaagctcaaggcagtggtggaagctaagaagctgatcctgggaggacttgaaaaaccagagaagaaagaagacaccacaatgtacctgctggccctgaagaatgccttgcttcccgaaggcatcccgctccttctgaagtatgctgaggctggagaagggcccgtcagccacctggccaccactgttctccagagatacgatgtctccttcatcacagatgaggtgaagaagaccttgaacaggatataccaccagaatcgtaaggttcatgagaagacggtgcgcacaactgccgctgctgtcatcttaaagaacccatcctacatggatgtgaagaacatcctgctgtccattggggaactcccgaaagagatgaacaaatacatgctcactgttgtgcaagacatcctgcattttgaaatgcctgcaagcaaaatgatccgtcgagttctcaaggagatggctgttcacaattatgaccgtttctccaagagtggatcctcttctgcctatactggctacgtagaacgtagcccccgtgcagcgtccacatacagccttgacatcctttactctggctctggcattctgaggagaagtaacctgaacatcttccagtacatcgggaaggcagagcttcatggtagtcaggtggtgattgaagcccaagggctggaaggcttaattgcagccactcctgatgaaggagaggagaaccttgactcttatgctggcatgtcagccatcctgtttgatgttcagcttaggcctgtcacattttttaatggatacagtgatttgatgtccaaaatgctgtcggcatccggcgaccctgtcagcgtggtgaaagggcttattctgttaatagaccattctcaggatattcagctgcaatctggactaaaggccaatatggagatccagggtggtctagctattgatatttctggttcaatggaattcagtctgtggtatcgagagtctaaaacccgagtgaaaaatcgggtggctgtggtgataaccagcgacgtcacagtggatgcctcttttgtgaaagctggtgtggaaagcagagcggagacagaggctgggctggagttcatctccacagtgcagttctcacagtacccgttcttggtctgcatgcagatggacaaggctgaagccccactcaggcaattcgagacaaagtatgaaaggctatctacaggcaggggatatgtctctcggagaagaaaagagagcctagtggccggatgtgaactccccctccatcaagagaactctgagatgtgcaacgtggtattcccacctcagccagaaagcgataactccggtggatggttttgattcccgtgggttcccttccaccagaacgatatgctttgacgtgcctgacccttgctctctgagagcacagtgtttacatatttacctgtatttaagatgtttgtaaagagcagtggagaacttcagttgattaaagttgaacctattcaggagaagacccacagtgtccctctgagtcaccatatgacacttagcaacatgcctacttcttgtactttgcaaaagtcctaactagtacagtgagtctagttttgcattgagaaactagtatttgtataaaaacaaaacaaaaacccacaccataaaagcttaggtaaatgtgaattttattcaacatcttttcagtgaaagtgaatccttgatagacccctaagctcgttttctatgaagcccactgcctaagaagggccggggtgaaaggaacccaagcaaaccatttttcttttgttgttgttgttttgttttgtttgcttttcttctctttcttttacttttttttcccccttctggtgtatatgggaaggttctaagaaaggatacagataagacttaaaagaattttgttagtcaatcttaagaattaatatttatgttttctgatagttttataagcgacaaggcgagagacggaattaaaatgtactgtgacatctctctgctggccccacagtgagaccacttggaagtcattcacccttttaaaaaactggaactgtcatacagggataaaaattattgagcctcagagcatccattagatttttctctggatgtgtctttttgatagtgtaatgtggtacatggttctttgtaggggacacccttgtagctaccactctatctatacctcaattgttggaaataatccatcaatttgactgcaatttatgcagtcaataaaagttgggatgatcattgcttaaaaaatgatggatttgtatttcaaaactatgaaattaaataaaaaccatgtctatttgtgtgaattaaaaggccacaccaagcatttaaacatatttattagtaaagcagatgtgtttattatagtacctcaccacccccccccccccaatgccaggtacttgttagtccactaaacaaatgggagtttaaaatggaagtggaaacacacgaagtggacgtttagctgaggtagaaaataaattgtgatgatgacaaataaacatttataatttactg

SEQ ID NO: 236 - RNA, 6318 nt, Homo sapiens
  source 1..6318: mol_type = mRNA
tagtaagacaggtgccttcagttcactctcagtaaggggctggttgcctgcatgagtgtgtgctctgtgtcactgtggattggagttgaaaaagcttgactggcgtcattcaggagctggatggcgtgggacatgtgcaaccaggactctgagtctgtatggagtgacatcgagtgtgctgctctggttggtgaagaccagcctctttgcccagatcttcctgaacttgatctttctgaactagatgtgaacgacttggatacagacagctttctgggtggactcaagtggtgcagtgaccaatcagaaataatatccaatcagtacaacaatgagccttcaaacatatttgagaagatagatgaagagaatgaggcaaacttgctagcagtcctcacagagacactagacagtctccctgtggatgaagacggattgccctcatttgatgcgctgacagatggagacgtgaccactgacaatgaggctagtccttcctccatgcctgacggcacccctccaccccaggaggcagaagagccgtctctacttaagaagctcttactggcaccagccaacactcagctaagttataatgaatgcagtggtctcagtacccagaaccatgcaaatcacaatcacaggatcagaacaaaccctgcaattgttaagactgagaattcatggagcaataaagcgaagagtatttgtcaacagcaaaagccacaaagacgtccctgctcggagcttctcaaatatctgaccacaaacgatgaccctcctcacaccaaacccacagagaacagaaacagcagcagagacaaatgcacctccaaaaagaagtcccacacacagtcgcagtcacaacacttacaagccaaaccaacaactttatctcttcctctgaccccagagtcaccaaatgaccccaagggttccccatttgagaacaagactattgaacgcaccttaagtgtggaactctctggaactgcaggcctaactccacccaccactcctcctcataaagccaaccaagataacccttttagggcttctccaaagctgaagtcctcttgcaagactgtggtgccaccaccatcaaagaagcccaggtacagtgagtcttctggtacacaaggcaataactccaccaagaaagggccggagcaatccgagttgtatgcacaactcagcaagtcctcagtcctcactggtggacacgaggaaaggaagaccaagcggcccagtctgcggctgtttggtgaccatgactattgccagtcaattaattccaaaacagaaatactcattaatatatcacaggagctccaagactctagacaactagaaaataaagatgtctcctctgattggcaggggcagatttgttcttccacagattcagaccagtgctacctgagagagactttggaggcaagcaagcaggtctctccttgcagcacaagaaaacagctccaagaccaggaaatccgagccgagctgaacaagcacttcggtcatcccagtcaagctgtttttgacgacgaagcagacaagaccggtgaactgagggacagtgatttcagtaatgaacaattctccaaactacctatgtttataaattcaggactagccatggatggcctgtttgatgacagcgaagatgaaagtgataaactgagctacccttgggatggcacgcaatcctattcattgttcaatgtgtctccttcttgttcttcttttaactctccatgtagagattctgtgtcaccacccaaatccttattttctcaaagaccccaaaggatgcgctctcgttcaaggtccttttctcgacacaggtcgtgttcccgatcaccatattccaggtcaagatcaaggtctccaggcagtagatcctcttcaagatcctgctattactatgagtcaagccactacagacaccgcacgcaccgaaattctcccttgtatgtgagatcacgttcaagatcgccctacagccgtcggcccaggtatgacagctacgaggaatatcagcacgagaggctgaagagggaagaatatcgcagagagtatgagaagcgagagtctgagagggccaagcaaagggagaggcagaggcagaaggcaattgaagagcgccgtgtgatttatgtcggtaaaatcagacctgacacaacacggacagaactgagggaccgttttgaagtttttggtgaaattgaggagtgcacagtaaatctgcgggatgatggagacagctatggtttcattacctaccgttatacctgtgatgcttttgctgctcttgaaaatggatacactttgcgcaggtcaaacgaaactgactttgagctgtacttttgtggacgcaagcaatttttcaagtctaactatgcagacctagattcaaactcagatgactttgaccctgcttccaccaagagcaagtatgactctctggattttgatagtttactgaaagaagctcagagaagcttgcgcaggtaacatgttccctagctgaggatgacagagggatggcgaatacctcatgggacagcgcgtccttccctaaagactattgcaagtcatacttaggaatttctcctactttacactctctgtacaaaaacaaaacaaaacaacaacaatacaacaagaacaacaacaacaataacaacaatggtttacatgaacacagctgctgaagaggcaagagacagaatgatatccagtaagcacatgtttattcatgggtgtcagctttgcttttcctggagtctcttggtgatggagtgtgcgtgtgtgcatgtatgtgtgtgtgtatgtatgtgtgtggtgtgtgtgcttggtttaggggaagtatgtgtgggtacatgtgaggactgggggcacctgaccagaatgcgcaagggcaaaccatttcaaatggcagcagttccatgaagacacgcttaaaacctagaacttcaaaatgttcgtattctattcaaaaggaaatatatatatatatatatatatatatatatatatatataaattaaaaaggaaagaaaactaacaaccaaccaaccaaccaaccaaccacaaaccaccctaaaatgacagccgctgatgtctgggcatcagcctttgtactctgtttttttaagaaagtgcagaatcaacttgaagcaagctttctctcataacgtaatgattatatgacaatcctgaagaaaccacaggttccatagaactaatatcctgtctctctctctctctctctctctctcttttttttttctttttccttttgccatggaatctgggtgggagaggatactgcgggcaccagaatgctaaagtttcctaacattttgaagtttctgtagttcatccttaatcctgacacccatgtaaatgtccaaaatgttgatcttccactgcaaatttcaaaagccttgtcaatggtcaagcgtgcagcttgttcagcggttctttctgaggagcggacaccgggttacattactaatgagagttgggtagaactctctgagatgtgttcagatagtgtaattgctacattctctgatgtagttaagtatttacagatgttaaatggagtatttttattttatgtatatactatacaacaatgttcttttttgttacagctatgcactgtaaatgcagccttcttttcaaaactgctaaatttttcttaatcaagaatattcaaatgtaattatgaggtgaaacaattattgtacactaacatatttagaagctgaacttactgcttatatatatttgattgtaaaaacaaaaagacagtgtgtgtgtctgttgagtgcaacaagagcaaaatgatgctttccgcacatccatcccttaggtgagcttcaatctaagcatcttgtcaagaaatatcctagtcccctaaaggtattaaccacttctgcgatatttttccacattttcttgtcgcttgtttttctttgaagttttatacactggatttgttaggggaatgaaattttctcatctaaaatttttctagaagatatcatgattttatgtaaagtctctcaatgggtaaccattaagaaatgtttttattttctctatcaacagtagttttgaaactagaagtcaaaaatctttttaaaatgctgttttgttttaatttttgtgattttaatttgatacaaaatgctgaggtaataattatagtatgatttttacaataattaatgtgtgtctgaagactatctttgaagccagtatttctttcccttggcagagtatgacgatggtatttatctgtattttttacagttatgcatcctgtataaatactgatatttcattcctttgtttactaaagagacatatttatcagttgcagatagcctatttattataaattatgagatgatgaaaataataaagccagtggaaattttctacctaggatgcatgacaattgtcaggttggagtgtaagtgcttcatttgggaaattcagcttttgcagaagcagtgtttctacttgcactagcatggcctctgacgtgaccatggtgttgttcttgatgacattgcttctgctaaatttaataaaaacttcagaaaaacctccattttgatcatcaggatttcatctgagtgtggagtccctggaatggaattcagtaacatttggagtgtgtattcaagtttctaaattgagattcgattactgtttggctgacatgacttttctggaagacatgatacacctactactcaattgttcttttcctttctctcgcccaacacgatcttgtaagatggatttcacccccaggccaatgcagctaattttgatagctgcattcatttatcaccagcatattgtgttctgagtgaatccactgtttgtcctgtcggatgcttgcttgattttttggcttcttatttctaagtagatagaaagcaataaaaatactatgaaatgaaagaacttgttcacaggttctgcgttacaacagtaacacatctttaatccgcctaattcttgttgttctgtaggttaaatgcaggtattttaactgtgtgaacgccaaactaaagtttacagtctttctttctgaattttgagtatcttctgttgtagaataataataaaaagactattaagagcaataaattatttttaagaaatcgagatttagtaaatcctattatgtgttcaaggaccacatgtgttctctattttgcctttaaatttttgtgaaccaattttaaatacattctcctttttgccctggattgttgacatgagtggaatacttggtttcttttcttacttatcaaaagacagcactacagatatcatattgaggattaatttatcccccctacccccagcctgacaaatattgttaccatgaagatagttttcctcaatggacttcaaattgcatctagaattagtggagcttttgtatcttctgcagacactgtgggtagcccatcaaaatgtaagctgtgctcctctcatttttatttttatttttttgggagagaatatttcaaatgaacacgtgcaccccatcatcactggaggcaaatttcagcatagatctgtaggatttttagaagaccgtgggccattgccttcatgccgtggtaagtaccacatctacaattttggtaaccgaactggtgctttagtaatgtggatttttttcttttttaaaagagatgtagcagaataattcttccagtgcaacaaaatcaattttttgctaaacgactccgagaacaacagttgggctgtcaacattcaaagcagcagagagggaactttgcactattggggtatgatgtttgggtcagttgataaaaggaaaccttttcatgcctttagatgtgagcttccagtaggtaatgattatgtgtcctttcttgatggctgtaatgagaacttcaatcactgtagtctaagacctgatctatagatgacctagaatagccatgtactataatgtgatgattctaaatttgtacctatgtgacagacattttcaataatgtgaactgctgatttgatggagctactttaagatttgtaggtgaaagtgtaatactgttggttgaactatgctgaagagggaaagtgagcgattagttgagcccttgccgggccttttttccacctgccaattctacatgtattgttgtggttttattcattgtatgaaaattcctgtgattttttttaaatgtgcagtacacatcagcctcactgagctaataaagggaaacgaatgtttcaaatcta

SEQ ID NO: 237 - RNA, 6464 nt, Mus musculus
  source 1..6464: mol_type = mRNA
gtcatgtgactggggactgtagtaagacaggtgccttcagttcactctcagtaaggggctggttgcctgcatgagtgtgtgctgtgtgtcagagtggattggagttgaaaaagcttgactggcgtcattcgggagctggatggcttgggacatgtgcagccaagactctgtatggagtgacatagagtgtgctgctctggttggtgaggaccagcctctttgcccagatcttcctgaacttgacctttctgaacttgatgtgaatgacttggatacagacagctttctgggtggattgaagtggtgtagcgaccaatcggaaatcatatccaaccagtacaacaatgagcctgcgaacatatttgagaagatagatgaagagaatgaggcaaacttgctagcggttctcacagagacactggacagtctccccgtggatgaagacggattgccctcatttgatgcactgacagatggagccgtgaccactgacaacgaggccagtccttcctccatgcctgacggcacccctccccctcaggaggcagaagagccgtctctacttaagaagctcttactggcaccagccaacactcagctcagctacaatgaatgcagcggtcttagcactcagaaccatgcagcaaaccacacccacaggatcagaacaaaccctgccattgttaagaccgagaattcatggagcaataaagcgaagagcatttgtcaacagcaaaagccacaaagacgtccctgctcagagcttctcaagtatctgaccacaaacgatgaccctcctcacaccaaacccacagaaaacaggaacagcagcagagacaaatgtgcttcgaaaaagaagtcccatacacaaccgcagtcgcaacatgctcaagccaaaccaacaactttatctcttcctctgaccccagagtcaccaaatgaccccaagggttccccatttgagaacaagactattgagcgaaccttaagtgtggaactctctggaactgcaggcctaactcctcccacaactcctcctcataaagccaaccaagataaccctttcaaggcttcgccaaagctgaagccctcttgcaagaccgtggtgccaccgccaaccaagagggcccggtacagtgagtgttctggtacccaaggcagccactccaccaagaaagggcccgagcaatctgagttgtacgcacaactcagcaagtcctcagggctcagccgaggacacgaggaaaggaagactaaacggcccagtctccggctgtttggtgaccatgactactgtcagtcactcaattccaaaacggatatactcattaacatatcacaggagctccaagactctagacaactagacttcaaagatgcctcctgtgactggcaggggcacatctgttcttccacagattcaggccagtgctacctgagagagactttggaggccagcaagcaggtctctccttgcagcaccagaaaacagctccaagaccaggaaatccgagcggagctgaacaagcacttcggtcatccctgtcaagctgtgtttgacgacaaatcagacaagaccagtgaactaagggatggcgacttcagtaatgaacaattctccaaactacctgtgtttataaattcaggactagccatggatggcctatttgatgacagtgaagatgaaagtgataaactgagctacccttgggatggcacgcagccctattcattgttcgatgtgtcgccttcttgctcttcctttaactctccgtgtcgagactcagtgtcaccaccgaaatccttattttctcaaagaccccaaaggatgcgctctcgttcaagatccttttctcgacacaggtcgtgttcccgatcaccatattccaggtcaagatcaaggtccccaggcagtagatcctcttcaagatcctgttactactatgaatcaagccactacagacaccgcacacaccgcaattctcccttgtatgtgagatcacgttcaaggtcaccctacagccgtaggcccaggtacgacagctatgaagcctatgagcacgaaaggctcaagagggatgaataccgcaaagagcacgagaagcgggagtctgaaagggccaaacagagagagaggcagaagcagaaagcaattgaagagcgccgtgtgatttacgttggtaaaatcagacctgacacaacgcggacagaattgagagaccgctttgaagtttttggtgaaattgaggaatgcaccgtaaatctgcgggatgatggagacagctatggtttcatcacctaccgttacacctgtgacgctttcgctgctcttgagaatggatatactttacgcaggtcgaacgaaactgacttcgagctgtacttttgtggacggaagcaatttttcaagtctaactatgcagacctagataccaactcagacgattttgaccctgcttccaccaagagcaagtatgactctctggattttgatagtttactgaaggaagctcagagaagcttgcgcaggtaacgtgttcccaggctgaggaatgacagagagatggtcaatacctcatgggacagcgtgtcctttcccaagactcttgcaagtcatacttaggaatttctcctactttacactctctgtacaaaaataaaacaaaacaaaacaacaataacaacaacaacaacaacaataacaacaacaaccataccagaacaagaacaacggtttacatgaacacagctgctgaagaggcaagagacagaatgataatccagtaagcacacgtttattcacgggtgtcagctttgctttccctggaggctcttggtgacagtgtgtgtgcgtgtgtgtgtgtgggtgtgcgtgtgtgtatgtgtgtgtgtgtacttgtttggaaagtacatatgtacacatgtgaggacttgggggcacctgaacagaacgaacaagggcgaccccttcaaatggcagcatttccatgaagacacacttaaaacctacaacttcaaaatgttcgtattctatacaaaaggaaaataaataaatataaattaaaaggaaagaaaactcacaaaccaccctaaaatgacactgctgatgcctgttgtcagcctccggtaccgtcttttcagaaagtgcaaaacccagaaagtgcaaaaccaacctgcagcaagctctctctctctcttaatgtaatcattacgtgacaatcccgaagacactacaggttccatagaactcatatccacctctctctctctctctctctctctctctctctctctctctctcctctctcctctctcctctctccctcccttctttgccattgaatctgggtgggagaggatactgcaggcaccagatgctaaactttcctaacattttgaagtttctgtagtttgtcctttgtcctgacacctatgtatatgttcaaaatgttgatcttccactgcagattttgaaaagccttgttattggtcaagcggggagtgtgttcagtggctccttctgaggagcagacgcggtgttacatgagtactgagagttgagtagaactctctggatgtgttcagatagtgtaattgctacattctctgatgtagttaagtatttacagatgttaaatggagtatttttattttatgtacatactctacaactatgttcttttttgttacagctatgcactgtaaatgcagccttcttttcaaaactgctaaatttttcttaatcaagaatattcaaatgtaattatgaggtgaaacaattattgtacactaacatatttagaagctaaacttactgcttatatatatttgattgtaaaaaaaaaaaaaaacaaaaccaacaaaacaaaagacagtgtgtgtgtgtgtgtccgttgagtgcaagtccaacaaaatggcgcttcacgcacatccatcccttcttaggtgagcttcaatctaagcatcttgtcaacaacaacaaaaatcctaggcccctcaaggtattaaccacttctgcaatatttttccacattttcttgttgcttgtttttctttgaagttttatacactggatttgttaggggaatgaaattttctcatctaaaatttttctagacaatatcatgattttatgtaaagtctctcaatggggaaccattaagaaatgtttttattttctctatcaacagtagatttgaaactagaggtcaaaaaaaatctttttaaaatgctgttttgttttaatttttgtgattttaatttgatacaaaatgctgaggtaataattacagtatgatttttacaatagtcaatgtgtgtctgaagactatctttgaagccagtatctctttcccttggcagagtatgatgatggtatttaatctgtattttttacagttatacatcctgtaaaatactgatatttcattcctttgtttactaaagagacatatttatcagttgcagatagcctatttattataaattaagagatgatgaaaataataaggtcagtggagactttctacccagggtgcatggcagttgtcaggctggagtgtaccttcttcgtttgggaaactcagctctcgcagaagcagtgttccatctttcactagcatggcctctgatacgaccatggtgttgttcttggtgacattgcttctgctaaatttaatattaataataataaatgtcagaaaaaaaaccctccattttgagcatcaggatttcatctgagtatggagtcgctgccatgggagtcactaaactttggagtatgtatttcatttccaaattgagatgcatttactgtttggctgacatgaattttctggaagatatgatagacctactacttaaccgtttttgtttgtttttttttctttgttgttgttgttttgttttttgtttttttgtttttctctctcacccaacactatcttacaaaatgggtttcacccccaggccaatgcagctaattttgacagctgcattcatttatcaccagcatattgtgttctgagtgaatccactgtctgtcctgtcgaatgcttgctcaagtgtttggcttattatttctaagtagatagaaagcaataaataactatgaaataaaaaagaattgtgttcacaggttctgcgttacaacagtaacacatctttaatccgcctaattcttgttctgtaggataaatgcaggtattttaactctttgtgaacgccaaactaaagtttacagtctttctttctgaattttgagtatcttctgttgtagaataataataaaaagactattaagagcaataaattatttttaagaaatcaatatttagtaaatcctgttatgtgtttaaggaccagatgcgttctctattttgcctttaaatttttgtgatccaactttaaaaacatacgttgtcttgtttgccctggatcatggacatgactaaaattttgtggtttcttttcttacttatcaaaagacaacactacagatttcatgttgaggattcattgagctctcaccctctggcctgacaaatcttgttaccatgaagatagttttcctccgtggacttcaaattgcatctaaaattagtgaagcttgtgtatcttatgcagacactgtgggtagcccatcaaaatataagctgtaagctttgttcctttcatttttttttttttacttcttttgggagagaatatttccaacaaacacatgcaccccaccaacaggggaggcaaatttcagcatagatctataagactttcagatgaccatgggccattgccttcatgctgtggtaagtactacatctacaattttggtacccgaactggtgctttagaaatgcggggtttttattaaaaaaaaaaaaaagaaatgtagcagaataattcttttagtgcagcaactcagtttttgtaaaggactctgagaacacttgggctgtgaacattcaaagcagcagagagggaacctggcactattggggtaaagtgtttgggtcagttgaaaaaaaggaaaccttttcatgcctttagatgtgagctaacagtaggtaatgatcatgtgtccctttttgatggctgtacgaagaacttcaatcactgtagtctaagatctgatctatagatgacctagaatagccatgtaatataatgtgatgattctaaatttgtacctatgtgacagacattttcaataatgtgaaaactgcagatttgatggagctactttaagatttgtaggtgaaagtgtgctactgttggttgaactatgctgaagagggaaagtgagtgattagtttgagcccttgctggctcttttccacctgccaattctacatgtattgttgtggttttattcattgtatgaaaattcctgtgatttttttttaaatgtgcagtacacatcagcctcactgagctaataaagggaaaagaatgtttcaaatcta

SEQ ID NO: 238 - RNA, 10642 nt, Homo sapiens
  source 1..10642: mol_type = mRNA
ctcctccctcctcccttgctcgctcgctggctccctccccccgggccggctcggcgttgactccgccgcacgctgcagccgcggctggaagatggcggggaacgactgcggcgcgctgctggacgaagagctctcctccttcttcctcaactatctcgctgacacgcagggtggagggtccggggaggagcaactctatgctgactttccagaacttgacctctcccagctggatgccagcgactttgactcggccacctgctttggggagctgcagtggtgcccagagaactcagagactgaacccaaccagtacagccccgatgactccgagctcttccagattgacagtgagaatgaggccctcctggcagagctcaccaagaccctggatgacatccctgaagatgacgtgggtctggctgccttcccagccctggatggtggagacgctctatcatgcacctcagcttcgcctgccccctcatctgcaccccccagccctgccccggagaagccctcggccccagcccctgaggtggacgagctctcactgctgcagaagctcctcctggccacatcctacccaacatcaagctctgacacccagaaggaagggaccgcctggcgccaggcaggcctcagatctaaaagtcaacggccttgtgttaaggcggacagcacccaagacaagaaggctcccatgatgcagtctcagagccgaagttgtacagaactacataagcacctcacctcggcacagtgctgcctgcaggatcggggtctgcagccaccatgcctccagagtccccggctccctgccaaggaggacaaggagccgggtgaggactgcccgagcccccagccagctccagcctctccccgggactccctagctctgggcagggcagaccccggtgccccggtttcccaggaagacatgcaggcgatggtgcaactcatacgctacatgcacacctactgcctcccccagaggaagctgcccccacagacccctgagccactccccaaggcctgcagcaacccctcccagcaggtcagatcccggccctggtcccggcaccactccaaagcctcctgggctgagttctccattctgagggaacttctggctcaagacgtgctctgtgatgtcagcaaaccctaccgtctggccacgcctgtttatgcctccctcacacctcggtcaaggcccaggccccccaaagacagtcaggcctcccctggtcgcccgtcctcggtggaggaggtaaggatcgcagcttcacccaagagcaccgggcccagaccaagcctgcgcccactgcggctggaggtgaaaagggaggtccgccggcctgccagactgcagcagcaggaggaggaagacgaggaagaagaggaggaggaagaggaagaagaaaaagaggaggaggaggagtggggcaggaaaaggccaggccgaggcctgccatggacgaagctggggaggaagctggagagctctgtgtgccccgtgcggcgttctcggagactgaaccctgagctgggcccctggctgacatttgcagatgagccgctggtcccctcggagccccaaggtgctctgccctcactgtgcctggctcccaaggcctacgacgtagagcgggagctgggcagccccacggacgaggacagtggccaagaccagcagctcctacggggaccccagatccctgccctggagagcccctgtgagagtgggtgtggggacatggatgaggaccccagctgcccgcagctccctcccagagactctcccaggtgcctcatgctggccttgtcacaaagcgacccaacttttggcaagaagagctttgagcagaccttgacagtggagctctgtggcacagcaggactcaccccacccaccacaccaccgtacaagcccacagaggaggatcccttcaaaccagacatcaagcatagtctaggcaaagaaatagctctcagcctcccctcccctgagggcctctcactcaaggccaccccaggggctgcccacaagctgccaaagaagcacccagagcgaagtgagctcctgtcccacctgcgacatgccacagcccagccagcctcccaggctggccagaagcgtcccttctcctgttcctttggagaccatgactactgccaggtgctccgaccagaaggcgtcctgcaaaggaaggtgctgaggtcctgggagccgtctggggttcaccttgaggactggccccagcagggtgccccttgggctgaggcacaggcccctggcagggaggaagacagaagctgtgatgctggcgccccacccaaggacagcacgctgctgagagaccatgagatccgtgccagcctcaccaaacactttgggctgctggagaccgccctggaggaggaagacctggcctcctgcaagagccctgagtatgacactgtctttgaagacagcagcagcagcagcggcgagagcagcttcctcccagaggaggaagaggaagaaggggaggaggaggaggaggacgatgaagaagaggactcaggggtcagccccacttgctctgaccactgcccctaccagagcccaccaagcaaggccaaccggcagctctgttcccgcagccgctcaagctctggctcttcaccctgccactcctggtcaccagccactcgaaggaacttcagatgtgagagcagagggccgtgttcagacagaacgccaagcatccggcacgccaggaagcggcgggaaaaggccattggggaaggccgcgtggtgtacattcaaaatctctccagcgacatgagctcccgagagctgaagaggcgctttgaagtgtttggtgagattgaggagtgcgaggtgctgacaagaaataggagaggcgagaagtacggcttcatcacctaccggtgttctgagcacgcggccctctctttgacaaagggcgctgccctgaggaagcgcaacgagccctccttccagctgagctacggagggctccggcacttctgctggcccagatacactgactacgattccaattcagaagaggcccttcctgcgtcagggaaaagcaagtatgaagccatggattttgacagcttactgaaagaggcccagcagagcctgcattgataacagccttaaccctcgaggaatacctcaatacctcagacaaggcccttccaatatgtttacgttttcaaagaaatcaagtatatgaggagagcgagcgagcgtgagagaacacccgtgagagagacttgaaactgctgtcctttaaaaaaaaaaaaaatcaatgtttacattgaacaaagctgcttctgtctgtgagtttccatggtgttgacgttccactgccacattagtgtcctcgcttccaacgggttgtcccgggtgcacctcgaagtgccgggtccgtcacccatcgccccttccttcccgactgacttcctctcgtagacttgcagctgtgttcaccataacatttcttgtctgtagtgtgtgatgatgaaattgttacttgtgaatagaatcaggactataaacttcatttttaattgaaaaaaaaagtatatccttaaaataatgtatttatggctcagatgtactgtgcctgggattattgtattgcttccttgattttttaactatgcactgtcatgaggtgtttgccactgagctgccctgctccccttgccagattgccctggaggtgctgggtggccgctaggctggtctgcaggaaagcgcggcctgccgtttccgggccgtatctgccaagccctgccttgtctcttactgagcaagtttggctcaaattataggagcccccatcttgtgcccagctcatgctccaagtgtgtgtctatccatttgtactcagactcttgagtaccttgtaaggaaggcggggcaagctgcatcattcctgttttccaggggaggctggcagctcctcaagaggcgaaatgactgtgggaggtccggttaccagtgaggaggcagagcggtgacccagaccaggccttctggttcttggtcccgtgcttccgtagtagctggggtaaagacaccgtttcagggactggtagaggtgagttcggctaaattgggcaccgggctagaagcctaagggctcattttaggggttacattaggtgttgattcaccagcatcaggtgaattcaagccctggcatgtgtcttggatgcaccatcagctttgatcctgagtggtcctgcggtttgtctgtgcctgtggacacactgtcagaacttcagtgacacccctggcagcggtacagacaggtggtctgggagcagtcatcttttttgggccagccaccagcccatcctactccctcaggtagtccttcgtctttaccttgtccttgtctgtaaagttgttttggtggctggggcaggggagccaggaggagggagtgaaggttgggaatagataggacaatctcctagctctcctccaattgagaaaacactccaattgggctttgctttaaactttgtgttcttaagtgatgtcaaagccatttccagcttaatgttctgtgggtaccttgggggccattcatgcagggagcatggccaggcagggtatgagtacattgtttctgatttctttcatacatcagggttcctcgggaaatttttgtattttttttttaagtcctgctgctttaaaaatttgaaagtggctcattaaactaaacaggctaatgtaatttgttgcttatgccaagcctagactgttgagaattgacgtttttaaagattatcaaatacctcagtaggtaaaatgagcccatgatcttccactgagtggtgagcatactcccagcccatggacaaggccggaagagacaggctttagtaggggtagggaatttgaactgttgtgtgtcacagcagttgacctctctggactccaatttcctttcctgtgaaatgaactgattagacatgtttcaacattgttagcttctgctgaggcagtgtctagcccaagatggcaaatacatagctcatgtgccactactcccacctccttgaccaatacagacataactaatcaatcacaccactcaggttccctgagcctggatgtgctataagaatcctgaaatcagtgctctggtaagtcattactaattgattagagttcaatctatttgacatcttgggctaatctttggaaggtttccaacaatcacacaaaaccatatgctggctgggtttcatgctggcctatccctgtctgtgatgttccgttccatgagagaaaactcccctaatgctattccatggcgtaacactcccaatactattttgacgcccacgtccccttgcagagggtgcagggggcggtagacgaatgacagacaggaacatatttggggaaggcagggcttaggaagatggaccaaaaagggacttcccacagcacagacctgatcattcggatttcctctttagctattcactgcctagcacatagtaggcacacaataaatgattatggaatgggataaaatttagatctttctgctgcctccactaagttaagtcctgatttacatcaaggagagaactgagataggaaagaacactagattccaagtctggagagttgggggagtccagattctaccaagaatttcctttgtaactttggtaagtcccttttactccctggcaccccggtgtgctgaaaggagttggtccatatatgatctcttagcccctcctatttgcttcttccttgattgctcttggtcaaagggtcagccttgggctggtgatactttagagtaaagaaatggagagttttagcaaaggaccagtctgtccctccctgctttggggtcagctaaagctgtcctttcatgtcagattaacctaggacacttgtagttagcttagacgttggcccttgagcagagacctgagcgtggcattgggacatgacatacctaaagtcagggctaggggacgctgcctgccaagggcatcgagtagtctctacttgctatcccgtacataaaatgctacaagttctaaaatttaccgaccctgcagacaacctctatcccgaaggactcattcggtgctgtgtattatttagggcaactccaaggtctattcagaaaaacgagtgaaccttggtctctttcccaccaaattgaggagtaacccagagggagcagctgccattggcaaccatctcgttgtagctctgtcctagtgtttgctcttgatgatgtttacatgtgatcgccataaagcttgctgtagactgtgtcgatagccgcccgcacagggcaggtcgtactgtccgtttctgtgccgtgctggtgttttccaaaaatgtctgatccaaccactaagtggaattcttccatctccttcctcagtctgtacaaggctgaatcagaatccccattctcgggggctctggttaccgaaggaaaatgcatcaaagagttaaagaatatgagtggatggagtgcagctaaggcccccaccccctgctccgtcacaacttgccccctcaaccaaaaagctgctttgagtcaaaaagcacccataagatacctgcatctgccttgaaatcttgcagcatggagtgtcatatgtactcaggagagaggcagggctttgcgggcaggagaaggaagggaggaatgctctgagctgcaaagacccagtactcaagttctgacgtgggaggagatgcagtgagacgtctcttgttgcctaaagcctgttcctgttggttttcttagagtgatttctcctagacatgtgcagtaggcccactggggctgctgtgcagtggtgagtaaaagggcagggaaggcatggacagcctggtccttctgcatggacagctcagtccatggcccatcccaggtatagagttcagttaatcccatttgagcctgcagcttaagagatggctcatcctaactgtgaagcaaaatcagccccagaggatgtattgatctgactcactgatgtcaaaattgcagtatttttttagcatttgagatttagcagctgccttcagtttggggttacccacatcccagcatcagatatgattaaggaaagaaattggatgtacaacagcaaagaaagtgaatgtcatggtttccctggccaaagaagagggaccctgtcatccttaccaatggggaagaagaaaactagtgcatgtgcaatatgtcaaagttagtcccctagtccctgaggggtttttacacacagatgggctccaggtctgctcgtcaagtttggaggtaccgggtaaatggaggggagctgcagagttggaaacccacatgcatggatgtgtccttggcccagaaccaccatgggatgggggaggccctgagccggctacaagacacccaggaagtaggcaaaggctgactttgcattaaacaataaaagcactttgagaaaaccccaacacttcagcctgggtccgtgtttctacactggaaaatacgagtctcctttggctgtgtgaagtgatcttctagagactgggacagggagtttgggaatggggctgctgtcaggtaggagagagcagagatgcctttggagatgtcagcagcaggagagccagtgctggggccaaccctttgctggccttttgttggaagcccttgaaacagggagccatgggtttagatcttggtacctacctttacagaaagatgaaaacagcccagctgagtgaaatgagtttgtagagtaagtcacttaactgtaagccatctcagaatcagaaaccctaatgtttcttacttgctatgtgaccttgggcccctgtttcctcatctaccaaatgagaatgttgaatatgagcattaaagtccctttcacctctgagaggctcagatccccaaccaggagcattgggaatccatcactcctccttgaaactgattccattctctgacttgacccagctcctgttcagggtgagggttctctgcaagaaccaaccagcagtaggttcaatcccactgtgtcctggctgagttgccttatccaagaagaccagctccccgggacagatctaagccatagtttctagtggggacagtaaggaattaaacccccaacttggctaggtaacgatgtcaaatctcacattaaccttgtctttgtccccactggatagctgttaatccgaatgttgtgaccatttggctgtttctctcttgttctcagacaatactagcaatacactttttttttttttttttaaagaaaaacagcttaggagcttttcacacatttctttcaaatgattgtaaaacatatggggcaacaggaggcattgatcgcgctgcatatgtttagggcagcttttgttttttgtttctttaatggtatagcagcagtgactgagccttcgtgattcctggggacagcttttcagatactctgtttcatcagtatgctttgcacatccggaaggagtacaaaaatccaactgcccaaatttggggcttggaaaataggttttataggtggtcggtccctgggctgtgcaacaactcctcaaagaggggtttatataactagaacccccctgggctgtatttttggtcaaaggagtctccaaggcggcttacaaaagcttcctttttcacttgaccacccttgctcattggttacttgtgaagggaattggtcagtttccacctcagcactttgccttatcaacatgcggtcgccatctagtggccaaaggttgtctccaccagctacccagatggaaggcaaataaatcctttcggccaccctgctgtccatcgtgaactttgggaatgaaatataatggcctgaacgaactgcctttgtgttcagagatcagtgcaacactagggtcagaagactccagaagcagccacttagtagactctcacgcagaactgagaaatgcactagctgtcctgtgggcagaagagacaggagtggaccaggagaggtccaggtgcccgggaagggtttactgtaactgcaatactggcagcccagctgctgaccttgttaagtaaacctttgctgggtggtccgaattctgccctcaaggcaagataagaagttgggtgtaaggattttgtggggggcctggccatgatctttgatatgatccccgaatagccaaatagttttttttgttcaattttttgtttctgtattttgtatttttaaaatcttgtcaaatgtttttgtgttaggaataaaaagtcataaactattcccaactttgtttcttgagggatgttctgattccaatggaaacaggtgggaaatctcaaggggagcgtggacaaggtggtatgtgcagcaggggaatagactgcttggatttccaaatggtttctggggaagatgaccatccagaagtccagcttagtgcagtctgctctggaattcacacccaccccctcgcctccttgtgccatgttgttagcattggcttggagcatctgcttcttccagaggcagctgctaatgttgaaaccaacacgagccctctccccaaccccaggtttctaaagaaggtgtctgtagccagccttaatcaactgggcaaggtggtccctatggtcctttccagcatttccaaatcttggactcaaattattttctcttggtgtgaccacacagcctagagaattctgagcaataggagccagggctttccctgactctgcgacagggtcaaaccaaggaatggctaaacctgtgaggttttgtcatccccgggggtactactgtagggggcattatttattaggaagcttaacaaggtaactacggcctgagtgcgtgagtgtaaggctgtgtttgtggtgggggtgtgtgtgtgtgtatctgtgcacacatacacacgtctgtgcctgtgtgtgtgtgtttgtgtgtgtgtgtgtgtgtggaattacattgatgcatttattgagaaaggtgcaagaatttcacctacacagagggacacatctgctttgttatttataatagaaagctaaattttaattttttaaaggacactgctaatgattgagaatcaagtttttagttttgctattttttttaattggtagaggatttttatatattttttccattttgttgggttgtgtccttatttatataaatactttatccgtaagaggcaaggaggaaaccttctttgcttttacatattgtggttgtcatcgtccctattttatttctggtgtgatttctctgtcttaccttctaaatgagaaaatgttttcttgtatttgtacattgtcagattctatagtttcctagataatttaaccaaattgctctatgtattattattctgtgagtataaagttctattttaatgtctgtaaatacttcagaactggcttcttttctcaaactcccactgtggggttattgtttacatcacagaaactgtagaatctctatgctcatgtactgtaaatagtgaagtgatctgcttataaataaacttaacaaatacactatggagattaaaaacaaaataccacccacaaaaaaaaaaaaaaaa

SEQ ID NO: 239 - RNA, 3656 nt, Mus musculus
  source 1..3656: mol_type = mRNA
ctcgctccctcccccgggcgggctcggcgctgactccgccgcacgctgcagccgcggctggaagatggcggggaacgactgcggcgcgctgctggatgaagagctctcgtccttcttcctcaactatctctctgacacgcagggtggggactctggagaggaacagctgtgtgctgacttgccagagcttgacctctcccagctggacgccagtgactttgactcagccacgtgctttggggagctgcagtggtgcccggagacctcagagacagagcccagccagtacagccccgatgactccgagctcttccagattgacagtgagaatgaagctctcttggctgcgcttacgaagaccctggatgacatccccgaagacgatgtggggctggctgccttcccagaactggatgaaggcgacacaccatcctgcaccccagcctcacctgcccccttatctgcaccccccagccccaccctggagaggcttctgtccccagcgtctgacgtggacgagctttcactgctacagaagctcctcctggccacatcctccccaacagcaagctctgacgctctgaaggacggggccacctggtcccagaccagcctcagttccagaagtcagcggccttgtgtcaaggtggatggcacccaggataagaagacccccacactgcgggctcagagccggccttgtacggaactgcataagcacctcacttcggtgctgccctgtcccagagtgaaagcctgctccccaactccgcacccgagccctcggctcctctccaaagaggaggaggaggaggtgggggaggattgcccaagcccttggccgactccagcctcgccccaagactccctagcacaggacacggccagccccgacagtgcccagcctcccgaggaggatgtgagggccatggtacagctcattcgctacatgcatacctactgcctgcctcagaggaagctgccccaacgggccccagagccaatcccccaggcctgcagcagcctctccaggcaggttcaaccccgatcccggcatccccccaaagccttctggactgagttctctatcctaagggaacttctggcccaagatatcctctgtgatgttagcaagccctaccgcctggccatacctgtctatgcttccctcacacctcagtccaggcccaggccccccaaggacagtcaggcctcccctgcccactctgccatggcagaagaggtgagaatcactgcttcccccaagagcaccgggcctagacccagcctgcgtcctctgaggctggaggtgaaacgggatgttaacaagcctacaaggcaaaagcgggaggaagatgaggaggaggaggaggaagaagaagaagaggaagaagaaaaagaagaggaagaagaggagtggggcaggaagagaccaggtcgtggcctgccatggaccaaactagggaggaagatggacagctccgtgtgccccgtgcggcgctccaggagactgaatccagagctgggtccctggctgacattcactgatgagcccttaggtgctctgccctcgatgtgcctggatacagagacccacaacctggaggaagacctgggcagcctcacagacagtagtcaaggccggcagctcccccagggatcccagatccccgccctggaaagcccctgtgagagtgggtgcggagacacagatgaagatccaagctgcccacagcccacttccagagactcctccaggtgcctcatgctggccttgtcacaaagcgactctcttggcaagaagagctttgaggagtccctgacggtggagctttgcggcacggcaggactcacgccacccaccacacctccatacaagccaatggaggaggaccccttcaagccagacaccaagctcagcccaggccaagacacagctcccagccttccctcccccgaggctcttccgctcacagccaccccaggagcttcccacaagctgcccaagaggcacccagagcgaagcgagctcctgtcccatttgcagcatgccacaacccaaccagtctcacaggctggccagaagcgccccttctcctgctcctttggagaccacgactactgccaggtgctcaggccagaggctgccctgcagaggaaggtgctgcggtcctgggagccaatcggggtccaccttgaagacttggcccagcagggtgcccctctgccaacggaaacaaaggcccctaggagggaggcaaaccagaactgtgaccctacccacaaggacagcatgcagctaagagaccatgagatccgtgccagtctcacaaagcactttgggctgctggagactgctctggaaggtgaagacctggcgtcctgtaaaagcccggagtatgacaccgtatttgaggacagcagcagcagcagtggcgagagtagcttcctgcttgaggaggaggaggaagaggaggagggaggggaagaggacgatgaaggagaggactcaggggtcagccctccctgctctgatcactgcccctaccagagcccacccagtaaggccagtcggcagctctgctcccgaagccgctccagttccggctcctcgtcctgcagctcctggtcaccagccacccggaagaacttcagacgtgagagcagagggccctgttcagatggaaccccaagcgtccggcatgccaggaagcggcgggaaaaggccatcggtgaaggccgtgtggtatacattcgaaatctctccagtgacatgagctctcgggaactaaagaagcgctttgaggtgttcggtgagattgtagagtgccaggtgctgacgagaagtaaaagaggccagaagcacggttttatcaccttccggtgttcagagcacgctgccctgtccgtgaggaacggcgccaccctgagaaagcgcaatgagccctccttccacctgagctatggagggctccggcacttccgttggcccagatacactgactatgatcccacatctgaggagtcccttccctcatctgggaaaagcaagtacgaagccatggattttgacagcttactgaaagaggcccagcagagcctgcattgatatcagccttaaccttcgaggaatacctcaatacctcagacaaggcccttccaatatgtttacgttttcaaagaaaagagtatatgagaaggagagcgagcgagcgagcgagcgagcgagtgagcgtgagagatcacacaggagagagaaagacttgaatctgctgtcgtttcctttaaaaaaaaaaaaacgaaaaacaaaaacaaatcaatgtttacattgaacaaagctgcttccgtccgtctgtccgtccgtccgtccgtccgtgagtttccatgctgttgatgttccactgccacgttagcgtcgtcctcgcttccagcggatcgtcctgggtgcgcctccaagtgctgtcagtcgtcctctgcccctcccacccgactgacttccttctgttagacttgagctgtgttcacataacatcttctgtctgtagagtgtgatgatgacattgttacttgtgaatagaatcaggagttagaaactcatttttaattgaagaaaaaaaaagtatatccttaaaaagaaaaaaaaaaaaacaaatgta

SEQ ID NO: 240 - RNA, 1892 nt, Homo sapiens
  source 1..1892: mol_type = mRNA
ggcgcccgcgcccgcccccgcgccgggcccggctcggcccgacccggctccgccgcgggcaggcggggcccagcgcactcggagcccgagcccgagccgcagccgccgcctggggcgcttgggtcggcctcgaggacaccggagaggggcgccacgccgccgtggccgcagatttgaaagaagccaacactaaaccacaaatatacaacaaggccattttctcaaacgagagtcagcctttaacgaaatgaccatggttgacacagagatgccattctggcccaccaactttgggatcagctccgtggatctctccgtaatggaagaccactcccactcctttgatatcaagcccttcactactgttgacttctccagcatttctactccacattacgaagacattccattcacaagaacagatccagtggttgcagattacaagtatgacctgaaacttcaagagtaccaaagtgcaatcaaagtggagcctgcatctccaccttattattctgagaagactcagctctacaataagcctcatgaagagccttccaactccctcatggcaattgaatgtcgtgtctgtggagataaagcttctggatttcactatggagttcatgcttgtgaaggatgcaagggtttcttccggagaacaatcagattgaagcttatctatgacagatgtgatcttaactgtcggatccacaaaaaaagtagaaataaatgtcagtactgtcggtttcagaaatgccttgcagtggggatgtctcataatgccatcaggtttgggcggatgccacaggccgagaaggagaagctgttggcggagatctccagtgatatcgaccagctgaatccagagtccgctgacctccgggccctggcaaaacatttgtatgactcatacataaagtccttcccgctgaccaaagcaaaggcgagggcgatcttgacaggaaagacaacagacaaatcaccattcgttatctatgacatgaattccttaatgatgggagaagataaaatcaagttcaaacacatcacccccctgcaggagcagagcaaagaggtggccatccgcatctttcagggctgccagtttcgctccgtggaggctgtgcaggagatcacagagtatgccaaaagcattcctggttttgtaaatcttgacttgaacgaccaagtaactctcctcaaatatggagtccacgagatcatttacacaatgctggcctccttgatgaataaagatggggttctcatatccgagggccaaggcttcatgacaagggagtttctaaagagcctgcgaaagccttttggtgactttatggagcccaagtttgagtttgctgtgaagttcaatgcactggaattagatgacagcgacttggcaatatttattgctgtcattattctcagtggagaccgcccaggtttgctgaatgtgaagcccattgaagacattcaagacaacctgctacaagccctggagctccagctgaagctgaaccaccctgagtcctcacagctgtttgccaagctgctccagaaaatgacagacctcagacagattgtcacggaacacgtgcagctactgcaggtgatcaagaagacggagacagacatgagtcttcacccgctcctgcaggagatctacaaggacttgtactagcagagagtcctgagccactgccaacatttcccttcttccagttgcactattctgagggaaaatctgacacctaagaaatttactgtgaaaaagcattttaaaaagaaaaggttttagaatatgatctattttatgcatattgtttataaagacacatttacaatttacttttaatattaaaaattaccatattatgaaattgctgatagta

SEQ ID NO: 241 - RNA, 1857 nt, Mus musculus
  source 1..1857: mol_type = mRNA
gtgtgacgacaaggtgaccgggctgaggggacgggctgaggagaagtcacactctgacaggagcctgtgagaccaacagcctgacggggtctcggttgaggggacgcgggctgagaagtcacgttctgacaggactgtgtgacagacaagatttgaaagaagcggtgaaccactgatattcaggacatttttaaaaacaagactaccctttactgaaattaccatggttgacacagagatgccattctggcccaccaacttcggaatcagctctgtggacctctccgtgatggaagaccactcgcattcctttgacatcaagccctttaccacagttgatttctccagcatttctgctccacactatgaagacattccattcacaagagctgacccaatggttgctgattacaaatatgacctgaagctccaagaataccaaagtgcgatcaaagtagaacctgcatctccaccttattattctgaaaagacccagctctacaacaggcctcatgaagaaccttctaactccctcatggccattgagtgccgagtctgtggggataaagcatcaggcttccactatggagttcatgcttgtgaaggatgcaagggttttttccgaagaaccatccgattgaagcttatttatgataggtgtgatcttaactgccggatccacaaaaaaagtagaaataaatgtcagtactgtcggtttcagaagtgccttgctgtggggatgtctcacaatgccatcaggtttgggcggatgccacaggccgagaaggagaagctgttggcggagatctccagtgatatcgaccagctgaacccagagtctgctgatctgcgagccctggcaaagcatttgtatgactcatacataaagtccttcccgctgaccaaagccaaggcgagggcgatcttgacaggaaagacaacggacaaatcaccatttgtcatctacgacatgaattccttaatgatgggagaagataaaatcaagttcaaacatatcacccccctgcaggagcagagcaaagaggtggccatccgaatttttcaagggtgccagtttcgatccgtagaagccgtgcaagagatcacagagtatgccaaaaatatccctggtttcattaaccttgatttgaatgaccaagtgactctgctcaagtatggtgtccatgagatcatctacacgatgctggcctccctgatgaataaagatggagtcctcatctcagagggccaaggattcatgaccagggagttcctcaaaagcctgcggaagccctttggtgactttatggagcctaagtttgagtttgctgtgaagttcaatgcactggaattagatgacagtgacttggctatatttatagctgtcattattctcagtggagaccgcccaggcttgctgaacgtgaagcccatcgaggacatccaagacaacctgctgcaggccctggaactgcagctcaagctgaatcacccagagtcctctcagctgttcgccaaggtgctccagaagatgacagacctcaggcagatcgtcacagagcacgtgcagctactgcatgtgatcaagaagacagagacagacatgagccttcaccccctgctccaggagatctacaaggacttgtattagcaggaaagtcccacccgctgacaacgtgttccttctattgattgcactattattttgagggaaaaaaatctgacacctaagaaatttactgtgaaaaagcatttaaaaacaaaaagttttagaacatgatctattttatgcatattgtttataaagatacatttacaatttacttttaatattaaaaattaccacattataaaatt

SEQ ID NO: 242 - RNA, 9965 nt, Homo sapiens
  source 1..9965: mol_type = mRNA
gcgccgcctccttcggcgttcgccccacggaccggcaggcggcggaccgcggcccaggctgaagctcagggccctgtctgctctgtggactcaacagtttgtggcaagacaagctcagaactgagaagctgtcaccacagtagcttggagctcggcggcacaaccagcaccatctggtcgcgatggtggacacggaaagcccactctgccccctctccccactcgaggccggcgatctagagagcccgttatctgaagagttcctgcaagaaatgggaaacatccaagagatttcgcaatccatcggcgaggatagttctggaagctttggctttacggaataccagtatttaggaagctgtcctggctcagatggctcggtcatcacggacacgctttcaccagcttcgagcccctcctcggtgacttatcctgtggtccccggcagcgtggacgagtctcccagtggagcattgaacatcgaatgtagaatctgcggggacaaggcctcaggctatcattacggagtccacgcgtgtgaaggctgcaagggcttctttcggcgaacgattcgactcaagctggtgtatgacaagtgcgaccgcagctgcaagatccagaaaaagaacagaaacaaatgccagtattgtcgatttcacaagtgcctttctgtcgggatgtcacacaacgcgattcgttttggacgaatgccaagatctgagaaagcaaaactgaaagcagaaattcttacctgtgaacatgacatagaagattctgaaactgcagatctcaaatctctggccaagagaatctacgaggcctacttgaagaacttcaacatgaacaaggtcaaagcccgggtcatcctctcaggaaaggccagtaacaatccaccttttgtcatacatgatatggagacactgtgtatggctgagaagacgctggtggccaagctggtggccaatggcatccagaacaaggaggcggaggtccgcatctttcactgctgccagtgcacgtcagtggagaccgtcacggagctcacggaattcgccaaggccatcccaggcttcgcaaacttggacctgaacgatcaagtgacattgctaaaatacggagtttatgaggccatattcgccatgctgtcttctgtgatgaacaaagacgggatgctggtagcgtatggaaatgggtttataactcgtgaattcctaaaaagcctaaggaaaccgttctgtgatatcatggaacccaagtttgattttgccatgaagttcaatgcactggaactggatgacagtgatatctccctttttgtggctgctatcatttgctgtggagatcgtcctggccttctaaacgtaggacacattgaaaaaatgcaggagggtattgtacatgtgctcagactccacctgcagagcaaccacccggacgatatctttctcttcccaaaacttcttcaaaaaatggcagacctccggcagctggtgacggagcatgcgcagctggtgcagatcatcaagaagacggagtcggatgctgcgctgcacccgctactgcaggagatctacagggacatgtactgagttccttcagatcagccacaccttttccaggagttctgaagctgacagcactacaaaggagacgggggagcagcacgattttgcacaaatatccaccactttaaccttagagcttggacagtctgagctgtaggtaaccggcatattattccatatctttgttttaaccagtacttctaagagcatagaactcaaatgctgggggtaggtggctaatctcaggactgggaagattacggcgaattatgctcaatggtctgattttaactcacccgatgttaatcaatgcacattgctttagatcacattcgtgatttaccatttaattaactggtaacctcaaaattcgtggcctgtcttcccattcaccccgcttttgactattgtgctcctttataattctgaaaactaatcagcactttttaacaatgtttataatcctataagtctagatgtatccaaaggtgaagtatgtaaaaagcagcaaaatatttatttcaaagacttcacttctgtttcctgaatctaaagaaagacaacatgctgctttttaatcataggatggagaattttaaagaactgtttgggccaggcacagtcgctcatacttgtaatcccagcactttgggaggccgaggcgggtggatcacaaggtcagcagatcgagaccatcctggccaacatggtgaaaccctgtctctactaaaaatacaaaaattagccgggtgtggtggcacatgcctgtaatcccagctactcgggaagctgaggcaggagaattgcttgaaccagggagttggaggttgcagtgagctaagactgcaccactgcactccagcctggtgacagaacgagactctgtcttaaaaacaaacaaacaaaaaaaaaatctgttagataagctatcaaaatgcagctgttgttttgtttttggctcactgttttcgtggttgtaactaatatgtggaaaggcccatttccaggtttgcgtagaagagcccagaaaacagagtctcaagacccccgctctggactgtcataagctagcacccgtggtaagcgggacgagacaagctcccgaagcccgccagcttcctgctccactcagctccgtccagtcaacctgaacccacccagtccagctgtctgtgggaatggtggtgttcttagggacagactgacaccttacttgtcagtgttcctccgggccccatttggcagctcccgtatcttttgttatgttgcttttaaagatatgatgttttattgttttaactcttggtgacagtagatgctctctggagcgcagacgaggcacatgtgtcttcatagcctgggctgggtgggagccagtcaccctgcggatcgagagagggggtagagtcttcttcaaatggcagttttacttcaaatggcagatttcacaagagttggttattttttacaatggtttaggttgttaagtctcctttgtatgtaaggtagttttttcaacatctaaaatttttgttttagccttcaaaaccaacttaccaacctcagtccagctgggaaggcagcgttgattatggtagtttgtcaagaatatatggacctggaaacactttctctctctgtccacctggtagataaattgtcctgttgagaatttttagatctggactggaactgccaggaccaccgcctccagggagtcgctgggcacctggaggtatcgtcgatgcctctcccccatctttagaaaatttggctcttctgaggtcattattattttaagaatgattaggattgataagggtcccatgaccagcattatgaaaatgcgagagtgggaaggacacagtgtgagacttccactagaaaaaagtgaaagttagggttaggacatccttttttaaaaattacaaatttagtccgttttggtttttgtaatcaggctaggcacagtggctcacacatggaatcccagcactttgggaggccgaggtgggaggatcacttgagcccaggagttcgagaccagcctaggcaacatagcaagaccctgtctgtacacaaaatttaaaaattagttcatcggggtggcacacatcagtagtcccagctactctgcaggctgaggtgggaggattgcttgaacccaggaggtcgaggctgcagtgagctgtgatctcaccactgcattccagcctgggtgacagagttagattccaccctctcccaccccggcaaaaaaaaaaaaaaaagatgcaatcaaaggggctgttggccagcaatggcagcagcagcggcgggcagtctgcccaagtgtcttaggaaccaaaagcaaataaaagtgtttccatatatgccaccagccaagtggccatcctaattcagaaagaagctagcctttgagtgtctgtcatggtgcatccgtttcagtattatttcctaaaatgagaagcccctgtgtcaacaagatccaggggctggagcccaatgccaagcctgtgttgtccccagcgaccctgcagctgctcgctctgatgtaccctgtgccattcaaggagatgtggtccaggaaagtgagcctcatggttttcagagaagtcattgttctgtttacattttcataaaacctgtttaaaatagctccccgtctcaggctttcagcagtaacagtgagctgactggcaagttcgatgttagctcccgggacactcagcagcgatggtgagcattttggtttccttaaggcccagcaagacttccagggacatctctggtgaagccagaatggagacacccgtgacctcaggctgaaagtcactcgacattggtctcttgtgttgatagggaaggaaatcaggcattcctatttctttaaataacaaaaccactaattgccactcaatgctggaatattttgggtcacctaatcatagatttctcagggcatcaatactcaaatataggctgattatgccccagttcaaatgggaactattaacagagtgcatttcttgcttgctgggtttcaacagacatcagccaaaagaacaaaagagatgtcaggacagattccaggagtgtcggagcacatgtgtggcacccgctccctctggcagcgaatgtaggaagtcgccaaatttacccactcttcaacaagtcattgtttaaacacggtttttcattttctcaacttttaatagcaaaaagtgccaaagtcctcagagacctaacagccttggtctaccgtgctgaccagggtgaaggcacggcgagggactcctcccagacgtgcctcttgtgtgccagctggctgtggctcgggagcagacgcaggcctctccattgtccaggggagcctggcggcgcatccctcctctcccacctcctggcacttccagctgggtgtcccacatgttggattccgtccccaccacacttccagagaccggagaactgtgcagggcctaaggccgtttggatgaattgtcaaaacaagatgcttccagttacagcggcaggagcgggactgggagcacgggctgacggctgctggtgcctttcttcccacctcgcttgcctgtttccgcttgacccttcctccagctccgatgagaagagtataaagcatcttcctaacgggtgtgtttgctatacgaacataatggacgtgaagtggggcagaaacccagaactcagcattcaaggatgcccaggagagctgtccctgttttaaagagctgtgttttgttttgtttcgcatttagagagcagacaaggcacccttctgctgcgctgatacgtttcttacactgggccattttagacccccagggaaacagccttcctggagcgttgtctggaggttccagggacagggcagcctcccagagccgagcaagagctcaaggtacaaatgagagatttgctataccgtgagaagtcaacaacttagccaccacttccccgcaatggaccatgtaacaaatacctcagcaggccctgcaaaaggccatgctagagctgaggcgcacagcctgtggcctctgtagttagggcaggtgggatggagactccttgagtgcacacacctgagcctgcccacacacaggggagcagcatctcgtatgacgtctggaaggaacttcggttgtgtaaagggagccttgaagatacgtgcaaaaggtgctaccccaatttggtgaaactgacattgggcacgtcttgggcttaggagaagcggccgatggtcccggcctgcagtgacaaacccccctccccgcaccgcccccagcaccccctctcctcttcacctcttcctgctggccacgaggaagccacttcctcagagagaccctaccagatgcggatggaaacagatgcaccaaagcaagccctgatgaaaccgcgacttcctaaggtctgtctcctctgaacttgcacctgggcctctctgtgtttggttccaagcacttcccacctcaaactcccattttcaaaccactgtatctctgcgcacatctgctacttaccagccgcatacatgatggagggttttttggtcctgatccagtggccacacctgtctttgaaatgtctcactgaactccagttttaaaatagattcattgcttcaacacagcaagcccaatgcacccagctaagactggcttgaccgacagcctggcctttggtggggggcttcctggggcctggggaaagctggccaccttcaacagctggtacctcttcaacagtgtggcctttcaaaatgcagatgccaccaggagaacatgcccacagctcaccacctatggatgccatggctctgggcagctttcaaagcaggttcctgtggtctcctcagctgtttgagggggtaacagcaaatcagcctccattttaaaatgaaaacaccagcctccagatgtagggcctgctgggtgttgctagccgctggtccccaggcacggtgcactttctccacctcctgcagcctccctgttgtttctagactcttgcacctggtgagtgcaaggataggtgacccaggggcctgcagccttgtcctcagctcccatctcctggactgccagcctcaccctctgcagttagcatggttggcctgatgcagggatcccgagggattactttttagaccttctttcacattcagaaaagtagtatagattcaggagaggcaagaaaattatgctgtccatagaagtcacccatgaagactgatgccaccacctgaaggctcatgattgttaaaaatgtccacgggaacctctcgtccacaggaggtttgtctcaacacttcccatttttacggcattggcattgccaagcatggggaagtatctgctcttctcatgttaaaagtggcccagcttttcttaactcagtccaagctgacttgtttagctgcactggaatttcttaccaaccaaatatttgcatcgagcaaagggggctgtgtgcacctccctaatggcagcgatgatggctgctgtcattcaagcccatcttcagacgtcacagtctggaagtgaaatgtccacaaacatctgtggcagaaaaggctatacggaccacccagttgtgctgcagctttacagagcaaggaagggttgtggcaaataaatgattaacctgcctcgactgtgctgagggcaacaaaggccatctcaccaaaggattattcgatgccattaaatcatcccgtgaccttcctgcttccgagtccatggcctttgcccagggcatgtactcccctgagaggccttctgcctagaaagatctatgactgggttccaaagttgaggcctaggtttttgctgggatttagatattttcaggcaccattttgacagcattcaggaaaacggttattgaccccatagactagggtaagaataaaggcaataaatttggtctgactcagaatataggagatccatatatttctctggaaaccacagtgtacactaaaatgtgaaattgaaggttttgttaaaaagaaaaagataatgagcttcatgctttgtttaattacataatgatttccattacgctatttctgtgaaatgcagcaggttcttaaacgttatttcagtggcatgggctggaagcttatcacaaaaagccatgtgtgtggccttatcagaacagaaagagacaggctggtgcccaaggctgctgcctgctccaccttttgccagctctggacatctgaggacgtcccggcagatctggaatggggccctcaactgaccatttgcttctcagaatttcagtttgagacatgagaggtataatcagttacttttctccccccagagaaacccttttgtgaggggagaggagctatggtatgtggttcagctgaaacacatacaactgcatccttttggagtcctttgccaacaaaaacagaccaacagaccagatggtgtccatgttcaatatcatgtcttgatggacgcagctgatgacctcaaatacttgagtggtctcatggctgttagatggattatttgaaaaaaaaaaaaaaaaaagagagaaaaaataattgatttttacatcagagatagcaaactaagacctggggaggggggtcagcttttattttattttattttttttaagtttgctagttgggtcaaatgtgaggaggagggagtctacctgccacctcttctcttgcccctcttctgcccacacatccagcatccaaaatccattcatttaatgaattgataaagtgccgtgcaaactggtgcacaaacaggcccccagtccacgcagcctggctcctaggaaaagtggtgaccgggcgtgggggggcatgccgcagccctgggacacagtcgggcaccttccccggacccccaggccttggctgtgcctcaagtcagagagggtcagccttcaggccccggagacgagtgactggccgatcatttcacaataaaatcactcacttttggcaacttcactttttttaaggcacagtcagttccttttctcatgtacctcacaaaagatgaagaccatgtagtactctttttggtaaagttacagtgttcatgttaaatatcacttttttctacattgtgtggtaaaaagaactacgttaatagctatatcttaaatactgtgatttgactttttgaaaaatatcctaatacaaatattttactaacttacaatcactcatttaataagaaacatttggattcttttgaaatcagtgttaattgactcatattcttaaaagcctggctcttgaccctattggaaacacaaaggaagctgaaatcaaacatctaaaatacactgcgtacacgtgtgcgtgcacacacacacacacacacacacacacacagctcttcatttctcctgagccatgcagaatttactttcaatgtggaaatctgttccctttaccacactgtatatgcacagagcacaagagaggctatctctagtcacttccaccagcgaggccttagactccgtattagaggccaccgatttcatacaacagtgtttcgctaaagacccttcactattcttgtttagtaaatagctgtctgctcttcagggaactgttacctatgggttattaccaaagaacgctggcaattggaaatgtcctgatggaaattctttgcacgtgccggttctctggcatcctccaggtggcccaacccaaagcagaaagcagaaaccacagaccccgtgagtctccccataccttgtttccaataacttggcaaaacttcttggtgcatattggttacaccctctgggattcataatgccattaggctaaaaccctaagagagagggttgacagaaacacacgcgagaatgaggcagatcccagagcaaggactgggcccagactctccacatgtgctctactagtgagtgccttatactctcagtattttggggcttacagcttcttatttgtgctaaaaaggtgcagttccaaagtaggaactgccacacaggccccagcatcctctctccaacttcatacctctctcctggtggggggagcgggcatccaggacctccggaatcaaggatgtgcagagaagagcgaaagtaatttttctagtcacatgaactgattggttccaggcaattagaaaatggctataaaataaccttaattttaaaaaaaaatcttgggtcttcgttttcctattaggagactgaactgaccacatgtattgatttatatcctgaatatatgggaacttctgtgtttgggatgtcctactgtaagactgatgaatgtacagagttaatttcagggtacagttttgccttaatggttttaaaaaataaactattttttaaaatttt

SEQ ID NO: 243 - RNA, 7454 nt, Mus musculus
  source 1..7454: mol_type = mRNA
ggagacccacagccactggagagggcacacgctaggaagggcacacgcgtgcgagttttcagggcccgcggaactgtccgccacttcgagtcccctggagcgccgtgcgccggctccgaacattggtgttcgcagctgttttgggggctggagggttcgtggagtcctggaactggagcgacgctgggtcctctggttgtcccctggaggggagggcacacgggcggggacatcggggcgctcccttctcacggcgtggtgcatttgggcgtatctcaccgggaggcgtttcctgagaccctcggggaacttagaggagagccaagttgaagttcaaggccctgccttccctgtgaactgacgtttgtggctggtcaagttcgggaacaagacgttgtcatcacagcttagcgctctgtggcctgcctggccacatccatccaacatggtggacacagagagccccatctgtcctctctccccactggaggcagatgacctggaaagtcccttatctgaagaattcttacaagaaatgggaaacattcaagagatttctcagtccatcggtgaggagagctctggaagctttggttttgcagactaccagtacttaggaagctgtccgggctccgagggctctgtcatcacagacaccctctctccagcttccagcccttcctcagtcagctgccccgtgatccccgccagcacggacgagtcccccggcagtgccctgaacatcgagtgtcgaatatgtggggacaaggcctcagggtaccactacggagttcacgcatgtgaaggctgtaagggcttctttcggcgaactattcggctgaagctggtgtacgacaagtgtgatcggagctgcaagattcagaagaagaaccggaacaaatgccagtactgccgttttcacaagtgcctgtctgtcgggatgtcacacaatgcaattcgctttggaagaatgccaagatctgaaaaagcaaaactgaaagcagaaattcttacctgtgaacacgacctgaaagattcggaaactgcagacctcaaatctctgggcaagagaatccacgaagcctacctgaagaacttcaacatgaacaaggtcaaggcccgggtcatactcgcgggaaagaccagcaacaacccgccttttgtcatacatgacatggagaccttgtgtatggccgagaagacgcttgtggccaagatggtggccaacggcgtcgaagacaaagaggcagaggtccgattcttccactgctgccagtgcatgtccgtggagaccgtcacggagctcacagaatttgccaaggctatcccaggctttgcaaacttggacttgaacgaccaagtcaccttgctaaagtacggtgtgtatgaagccatcttcacgatgctgtcctccttgatgaacaaagacgggatgctgatcgcgtacggcaatggctttatcacacgcgagttccttaagaacctgaggaagccgttctgtgacatcatggaacccaagtttgacttcgctatgaagttcaatgccttagaactggatgacagtgacatttccctgtttgtggctgctataatttgctgtggagatcggcctggccttctaaacataggctacattgagaagttgcaggaggggattgtgcacgtgcttaagctccacctgcagagcaaccatccagatgacaccttcctcttcccaaagctccttcaaaaaatggtggaccttcggcagctggtcacggagcatgcgcagctcgtacaggtcatcaagaagaccgagtccgacgcagcgctgcacccactgttgcaagagatctacagagacatgtactgatctttcctgagatggcaggccgttgccactgttcagggacctccgaggcctgcggccccatacaggagagcagggatttgcacagagggcctccctcctacgcttggggatgaagagggctgagcgtaggtaatgcgggctctccccacatcctttctgaatgggcacttctaagactacctgctaccgaaatgggggtgatcggaggctaataggattcagacagtgacagacaacggcagtccccagtctggtcttaaccggcccaatgttaatcaatgcacagcactctacgttgcgtttataattcgccattaattaacgggtaacctcaaagtctgagcggtctgttcccttcctgccacccttctggctatgtgcactctcttaaatccctgaaaactaatctgcactttttaacctttgaaaacctacaagtcaaggtgtggcccaaggttagccatttaaatgtggcaaaaaaaaaaaaaaatgtttattgggaagacttcacttgagtttcctggctctaagaaagagagctggcttctgagaacattcgagaatagtttgataagctatcccatcactctctctgtgggctcactgttctggagggtgtaactgactcatgagggtggggatggggggtggggagcattttcagatttgtgtagaagattcccagaaagttacatcttcaagaagccctcagaaggcctccgctagtgtccgatagacaaagacaggatgagccctgagcaggtagttctgcacctctgttcatgtcagaccctcagcgtgtgggcatggcagcaatatcagaggtagattcacaaaagatttgtaaatgctcctctaggcccctcctttggcagctcctttgatatgatactttactgctttgtaaaaaacaaaaacaaaaacaaacaaacaaaaaaaaacctctcttggtgatgagatgcgctctctctatctctctggagtagagaaggcaaaagtgacttcgctatccaggcagaagggagctggtcgccttggagaacaagagacgagggtgtgatttcatccagcttctgtttgtacccagcagaagagctcacaacacttggttggtctgtggttattgttgttgttgttgttattgttgttgtttcaaagaattaggtggtaaagtcccttttcctcagtccctggggaaagcagtgctggctaccttcaaaagaaacagttgcacaaaggagtctcagacctcatggactcccggcacccaccctccaagggggtggctacatatttcagagcaggttgcaccttctacgctcccgacccatctttagaaaactggccatcttctgacgtcatcatcatttgtgattaaagaatgatccagatggacactgccaaggagtcgaggatgtagcccagtggatggaggggcttggttcctggtgccgatttatggacatggtggtagatgcctgcaaccccagcagaagtcagaggtcgccttcagatacataattaagtgggatgctagtctgtgccgtgtgagaccctgtttaaaagagaaaaagattgctgctgacgaaatgttcaaggtcagcattatgaaaacactaataagaataataataagggaaaattagcattgggacatactttaagatttgcacccttactgaccttccccactccctcctgctcttccttctcccctcctccctgtcttctgtccttcctcaaacccacttgccccctttgtcttccctccttgctgccaatcaaaggctctgttggacagcagttgctgcaggcagtctgccaaggctcttaggaatcagagggcagagcaagtcatcttcatgtatgatcctggtgagggttgagctcagtcaggaaggagccagcctttgtgtcacatggcacagccagtcctcagtgcttccagagggagagctggtcctatgtttggaaggtcccctaggaggacaggatcctgttctggtgaatcttagacaaatgccactcgtaggtgaccttggaaagggagttttgagtcatgggctttcgggatagttgagcattctgtttgaactcgcctaaaacttatgaagagtagtcccttgctgtgtgccttcagcatggaccaactgactgacaagttccgtgtcagtctgcatctgagctgatgctcagtcgagttcatgcaagtttcgttctcctggagcctcgtgggactgccagtaagctatccctagagaagccaggagggaccacagtggccttggcttcaaagtcagtgactctgtgtacatgtaccttcctttatgggaaggatattcacaatgtggccacatggtgctaggacctttcaggtcacctagtcagatttctcaaggccttagtaacccaagacatgccaggttaaatactgtgacacacttaggaactgagaaagctggcagctatgctctgcaaggtgtgtcagtggcatcagccaacagcccaatcagagatgccaccttggctcctggagctctagagcagggttgcaaagccacttcccagcactgatggcaaagtcttagtgccagactccttggagaccgatggggaccaggcagccttggtgtccctctgccctgcctcctgttgtcttcaagaggctgtgtgacctagtgaagacacattcgatgtttaagggagccttaaagatgcacacatgcaaaatttagtcatcgactggactaaggtctatcatggcctcccttttgatcctgtctgcgggggctcctccagcccctccctccacggcacctctttctgctggtcctataggcccttccccagaaaagattgcttgaagcagaccagaaaaacatggcccttgggctcctatacactcagcttgcatctgatcctaaacatgtctcaccttgagcctttatctaacacactatgtcatgggttatgttagacactcagcagccagatgcatggaggatggggacttttgttctgcatcattggtttgaaaatgactggctgaactccagtttaaagttttcccggtgtcccctgagattaaccagcctttgaccccagggcctcctacagccaaaaagcctgccaccatcactgtatctctctttaacctgtgtggcctttcaagaggagtttccactagaaaaatcaggaactccctacagctgctcacccagcatagagagtaggtcctgttctccttctacagccccggggggcggggcgggggggtgagaacaggaatctaaacccatcttcaagtagataccaccagcctgatggccatcttggcttcctgctgagccaccaggcaccactctgtccttggtccacatttatatggctgactcccaagaccagagtaggttaagaatattagagtaagagcctgactcaggccagagatgacccttgtctttatctaaaaacactaaaatctgcatggagaggttttgatttaaataagtggaccacgttcctcaccgagactcctctgtggggggatgtgtgctgacatctctggttttacttcagtggagtgtcctcctggctcatcaggaaaagatgtatggtccctaatcaggacagagtgtgagaggctgctgctgcctggcctgtcaccagcctgggacccctgaggacattttctcaacgtcagacctcagccatcttacttctcagaatcttagtctgagacatgagaaatggaggccgttgcttttctcccaaaggggaactttagttagggggggtgggtggttgaatcgtgaggaacacctttcagagaatcctgtgccaaccagaagtggaccaaactgcgcccagggtcagcgtcacgtcttgaccaagcagctggcagcacctgacaccttagtggcgatcaagtactactgttggcaaaaggcaaggagaagcaccgttttgtgtcatagcaaccaggctgtttcgttgtcttttcatggggtcaaatatgaaaaccttgcagttctatgtagagggagaaataacgctcttctctcacctctttccccaacccaaactccactgcaaactcatttattcggcaaagacaaatgcttcatccctgggtcccaggtcccaggtggtgagggcagagcagaggcaggtggccctctgggctccctggttggcacaaggcactgggacatctttcccaggcccctgggactcagctgtgcttcaagtcacacacagagcctggccctgaagaccagggagtgattgagtctttcctggtaaaattgtcactttgggaaatttcacttaaaaaaaaaaaaaaaaggcggggcccagccagctcttttgtcaagcctgaaactaagtgtacctcacaacagacgaacgccacttggcaccctttctaggaagatgtcagtattatccatgttaagtgtcacgatgttttctgcactgaatgaaaaagaatgctcttcatagctatatcttaatactgtgatttttaaaacaaaaacaaacaaacaaaccactctgatacaactagttaactagcttgtggtcgtgtgtctaatcaccgatacctggagttctctaatccagggttcagtccagtgtatgttcaaagcctagctcttgaacctgctgggcacagcagaagcccaaataaacaactgcagacagctgccccggggtgtgcacccctcacctgtcactgtccctaagctgtgtacaatctcttcccaatgtgtgaatctgttccttcagtcacttttatttaaaaacaaaaaacaagtgccagccaggtttgactgaaccatgacaggaaaccgtcaactttacatcagtgtttccgtcagggccactgtgtaggcctcttaggctactgttttagagaattgttagctatgaattattaccaaagaacggtggcaatttgagctgttctgttgagtctccatgtcatttccaatgtcctggccacatttctccttggcgtgtcttcataactccaagatccacaatgtcattatcacattggaggccaagggggtggggtcttacagacacacctgaggacaggcacatttccaaagcaaggtctgaggcctgcttcctgccacttgctcactactgtccttggtgccatcctctcagacctggggatttgcagcccttcacccctgtgataacaggcctaaataggaattattgagccgataccagcatccccacccccaccccccagcttgttgtggatacagggctatccaggacatcaggaatcagggtgaacacagaagggcaaatagaattttctagtcacatgagctgattggttccaggcaattagaaaatggctgtaacttaatcttaatttaaaaaaaaaaaaatcgagtctgttttctccataggagactgaactgactgtacgagtgatttatatcctgaatttatgggaacccgtatgtttggaacgtcctcctgtaagctgatgaatgtaaagagttaatttcagggtacagttttgccttaatggttttaaaaaaaaataaactatttttaaaaattaaaaaaaaaa

SEQ ID NO: 244 - RNA, 5292 nt, Homo sapiens
  source 1..5292: mol_type = mRNA
ctcttgcagtgaggtgaagacatttgaaaatcaccccactgcaaactcctccccctgctagaaacctcacattgaaatgctgtaaatgacgtgggccccgagtgcaatcgcgggaagccagggtttccagctaggacacagcaggtcgtgatccgggtcgggacactgcctggcagaggctgcgagcatggggccctggggctggaaattgcgctggaccgtcgccttgctcctcgccgcggcggggactgcagtgggcgacagatgcgaaagaaacgagttccagtgccaagacgggaaatgcatctcctacaagtgggtctgcgatggcagcgctgagtgccaggatggctctgatgagtcccaggagacgtgcttgtctgtcacctgcaaatccggggacttcagctgtgggggccgtgtcaaccgctgcattcctcagttctggaggtgcgatggccaagtggactgcgacaacggctcagacgagcaaggctgtccccccaagacgtgctcccaggacgagtttcgctgccacgatgggaagtgcatctctcggcagttcgtctgtgactcagaccgggactgcttggacggctcagacgaggcctcctgcccggtgctcacctgtggtcccgccagcttccagtgcaacagctccacctgcatcccccagctgtgggcctgcgacaacgaccccgactgcgaagatggctcggatgagtggccgcagcgctgtaggggtctttacgtgttccaaggggacagtagcccctgctcggccttcgagttccactgcctaagtggcgagtgcatccactccagctggcgctgtgatggtggccccgactgcaaggacaaatctgacgaggaaaactgcgctgtggccacctgtcgccctgacgaattccagtgctctgatggaaactgcatccatggcagccggcagtgtgaccgggaatatgactgcaaggacatgagcgatgaagttggctgcgttaatgtgacactctgcgagggacccaacaagttcaagtgtcacagcggcgaatgcatcaccctggacaaagtctgcaacatggctagagactgccgggactggtcagatgaacccatcaaagagtgcgggaccaacgaatgcttggacaacaacggcggctgttcccacgtctgcaatgaccttaagatcggctacgagtgcctgtgccccgacggcttccagctggtggcccagcgaagatgcgaagatatcgatgagtgtcaggatcccgacacctgcagccagctctgcgtgaacctggagggtggctacaagtgccagtgtgaggaaggcttccagctggacccccacacgaaggcctgcaaggctgtgggctccatcgcctacctcttcttcaccaaccggcacgaggtcaggaagatgacgctggaccggagcgagtacaccagcctcatccccaacctgaggaacgtggtcgctctggacacggaggtggccagcaatagaatctactggtctgacctgtcccagagaatgatctgcagcacccagcttgacagagcccacggcgtctcttcctatgacaccgtcatcagcagagacatccaggcccccgacgggctggctgtggactggatccacagcaacatctactggaccgactctgtcctgggcactgtctctgttgcggataccaagggcgtgaagaggaaaacgttattcagggagaacggctccaagccaagggccatcgtggtggatcctgttcatggcttcatgtactggactgactggggaactcccgccaagatcaagaaagggggcctgaatggtgtggacatctactcgctggtgactgaaaacattcagtggcccaatggcatcaccctagatctcctcagtggccgcctctactgggttgactccaaacttcactccatctcaagcatcgatgtcaacgggggcaaccggaagaccatcttggaggatgaaaagaggctggcccaccccttctccttggccgtctttgaggacaaagtattttggacagatatcatcaacgaagccattttcagtgccaaccgcctcacaggttccgatgtcaacttgttggctgaaaacctactgtccccagaggatatggttctcttccacaacctcacccagccaagaggagtgaactggtgtgagaggaccaccctgagcaatggcggctgccagtatctgtgcctccctgccccgcagatcaacccccactcgcccaagtttacctgcgcctgcccggacggcatgctgctggccagggacatgaggagctgcctcacagaggctgaggctgcagtggccacccaggagacatccaccgtcaggctaaaggtcagctccacagccgtaaggacacagcacacaaccacccgacctgttcccgacacctcccggctgcctggggccacccctgggctcaccacggtggagatagtgacaatgtctcaccaagctctgggcgacgttgctggcagaggaaatgagaagaagcccagtagcgtgagggctctgtccattgtcctccccatcgtgctcctcgtcttcctttgcctgggggtcttccttctatggaagaactggcggcttaagaacatcaacagcatcaactttgacaaccccgtctatcagaagaccacagaggatgaggtccacatttgccacaaccaggacggctacagctacccctcgagacagatggtcagtctggaggatgacgtggcgtgaacatctgcctggagtcccgtccctgcccagaacccttcctgagacctcgccggccttgttttattcaaagacagagaagaccaaagcattgcctgccagagctttgttttatatatttattcatctgggaggcagaacaggcttcggacagtgcccatgcaatggcttgggttgggattttggtttcttcctttcctcgtgaaggataagagaaacaggcccggggggaccaggatgacacctccatttctctccaggaagttttgagtttctctccaccgtgacacaatcctcaaacatggaagatgaaaggggaggggatgtcaggcccagagaagcaagtggctttcaacacacaacagcagatggcaccaacgggaccccctggccctgcctcatccaccaatctctaagccaaacccctaaactcaggagtcaacgtgtttacctcttctatgcaagccttgctagacagccaggttagcctttgccctgtcacccccgaatcatgacccacccagtgtctttcgaggtgggtttgtaccttccttaagccaggaaagggattcatggcgtcggaaatgatctggctgaatccgtggtggcaccgagaccaaactcattcaccaaatgatgccacttcccagaggcagagcctgagtcactggtcacccttaatatttattaagtgcctgagacacccggttaccttggccgtgaggacacgtggcctgcacccaggtgtggctgtcaggacaccagcctggtgcccatcctcccgacccctacccacttccattcccgtggtctccttgcactttctcagttcagagttgtacactgtgtacatttggcatttgtgttattattttgcactgttttctgtcgtgtgtgttgggatgggatcccaggccagggaaagcccgtgtcaatgaatgccggggacagagaggggcaggttgaccgggacttcaaagccgtgatcgtgaatatcgagaactgccattgtcgtctttatgtccgcccacctagtgcttccacttctatgcaaatgcctccaagccattcacttccccaatcttgtcgttgatgggtatgtgtttaaaacatgcacggtgaggccgggcgcagtggctcacgcctgtaatcccagcactttgggaggccgaggcgggtggatcatgaggtcaggagatcgagaccatcctggctaacacgtgaaaccccgtctctactaaaaatacaaaaaattagccgggcgtggtggcgggcacctgtagtcccagctactcgggaggctgaggcaggagaatggtgtgaacccgggaagcggagcttgcagtgagccgagattgcgccactgcagtccgcagtctggcctgggcgacagagcgagactccgtctcaaaaaaaaaaaacaaaaaaaaaccatgcatggtgcatcagcagcccatggcctctggccaggcatggcgaggctgaggtgggaggatggtttgagctcaggcatttgaggctgtcgtgagctatgattatgccactgctttccagcctgggcaacatagtaagaccccatctcttaaaaaatgaatttggccagacacaggtgcctcacgcctgtaatcccagcactttgggaggctgagctggatcacttgagttcaggagttggagaccaggcctgagcaacaaagcgagatcccatctctacaaaaaccaaaaagttaaaaatcagctgggtacggtggcacgtgcctgtgatcccagctacttgggaggctgaggcaggaggatcgcctgagcccaggaggtggaggttgcagtgagccatgatcgagccactgcactccagcctgggcaacagatgaagaccctatttcagaaatacaactataaaaaaataaataaatcctccagtctggatcgtttgacgggacttcaggttctttctgaaatcgccgtgttactgttgcactgatgtccggagagacagtgacagcctccgtcagactcccgcgtgaagatgtcacaagggattggcaattgtccccagggacaaaacactgtgtcccccccagtgcagggaaccgtgataagcctttctggtttcggagcacgtaaatgcgtccctgtacagatagtggggattttttgttatgtttgcactttgtatattggttgaaactgttatcacttatatatatatatatacacacatatatataaaatctatttatttttgcaaaccctggttgctgtatttgttcagtgactattctcggggccctgtgtagggggttattgcctctgaaatgcctcttctttatgtacaaagattatttgcacgaactggactgtgtgcaacgctttttgggagaatgatgtccccgttgtatgtatgagtggcttctgggagatgggtgtcactttttaaaccactgtatagaaggtttttgtagcctgaatgtcttactgtgatcaattaaatttcttaaatgaaccaatttgtctaaaaaaaaaaa

SEQ ID NO: 245 - RNA, 4549 nt, Mus musculus
  source 1..4549: mol_type = mRNA
gcagactcctcccccgcctggaaacctcgcccctagtactgggaatgactctgggcgtgcggcgtagtttgcagccgggacaccgtgaggcttgcgagcccagattcgcagccgagacaccgtggggcccgcgatccagtgtttgcagcgggaacatttcggggtctgtgatccgagtgaggacgcaacgcagaagctaaggatgagcaccgcggatctgatgcgtcgctgggtcatcgccctgctcctggctgctgccggagttgcagcagaagactcatgcagcaggaacgagttccagtgtagagacggaaaatgcatcgctagcaagtgggtgtgcgatggcagccccgagtgcccggatggctccgatgagtccccagagacatgcatgtctgtcacctgtcagtccaatcaattcagctgtggaggccgtgtcagccgatgcattcctgactcctggagatgtgatggacaggtagactgtgaaaatgactcagacgaacaaggctgtccccccaagacgtgctcccaggatgacttccgatgccaggatggcaagtgcatctccccgcagtttgtgtgtgatggagaccgagattgcctagatggctctgatgaggcccactgccaggccaccacttgtggccccgcccacttccgctgcaactcatccatatgcatccccagtctttgggcctgcgacggggatgtcgactgtgttgacggctccgatgagtggccacagaactgccagggccgagacacggcctccaaaggcgttagcagcccctgctcctccctggagttccactgtggtagcagtgagtgtatccatcgcagctgggtctgtgacggcgaggcagactgcaaggacaagtcagatgaggagcactgcgcggtggccacctgccgacctgatgaattccagtgtgcagatggctcctgcattcacggtagccgccagtgtgaccgtgaacatgactgcaaggacatgagcgacgagctcggctgcgtcaatgtgacacagtgtgatggccccaacaagttcaagtgtcacagtggggagtgcatcagcttggacaaggtgtgcgactccgcccgcgactgccaggactggtcggatgagcccatcaaggagtgcaagaccaacgagtgtttggacaacaatggtggctgttcccacatctgcaaggacctcaagattggctctgagtgcctgtgtcccagcggcttccggttggtggacctccacaggtgtgaagatattgacgagtgtcaggagccagacacctgcagccagctctgtgtgaacctggaaggcagctacaagtgtgagtgccaggccggcttccacatggacccacacaccagggtctgcaaggctgtgggctccataggctatctgctcttcaccaaccgccacgaggtccggaagatgaccctggaccgcagcgagtacaccagtctgctccccaacctgaagaatgtggtggctctcgacacggaggtgaccaacaatagaatctactggtccgacctgtcccaaaaaaagatctacagcgccctgatggaccaggcccctaacttgtcctacgacaccatcatcagtgaggacctgcatgcccctgacgggctggcggtagactggatccaccgcaacatctactggacagattcagtcccaggcagcgtatctgtggctgacaccaagggcgtaaagaggaggacactgttccaagaggcagggtccagacccagagccatcgtagtggaccctgtgcatggcttcatgtactggacagattggggaacacccgccaagatcaagaaagggggtttgaatggtgtggacatccactcactggtgaccgaaaacatccagtggccaaatggcatcacactagatctttccagtggccgtctctattgggttgattccaaactccactctatctccagcatcgatgtcaatgggggcaatcggaaaaccattttggaggatgagaaccggctggcccaccccttctccttggccatctatgaggacaaagtgtattggacagatgtcataaacgaagccattttcagtgccaatcgactcacgggttcagatgtgaatttggtggctgaaaacctcttgtccccggaggacattgtcctgttccacaaggtcacacagcctagaggggtgaactggtgtgagacaacagccctcctccccaatggtggttgccagtacctgtgcctgcccgccccacagatcggtccccactcgcccaaattcacctgcgcctgccctgatggcatgctgctggccaaggacatgcggagctgcctcacagaagtcgacactgtactgaccacccaggggacatccgccgtccggcctgtggtcaccgcatcagctaccaggccaccgaagcacagtgaggatctctcagctcccagtactcctaggcagcctgtggacaccccagggctcagcacagtggcgtcagtgacagtgtcccaccaagtccagggtgacatggctggcagagggaatgaggagcagccacatggtatgaggttcctgtccatcttcttccctattgcactggttgccctccttgtccttggggccgtcctgctgtggaggaactggcggctgaagaacatcaacagcataaactttgacaacccagtctaccagaagaccacagaggacgagctccacatttgccgaagccaggatggctatacctacccctcaagacagatggtcagcctggaggacgatgtggcatgagcagccgggagagccgtctctttccgggatccattgccaagcttaggcagaaaagacactctctccagacctccccatccagcactggtcctgccacctccctgggctctgtgttgctcaaagcaagataagagcaaagctgggctgggggccaagctcagctgcctgtctgccccaggttctgttttatatatttattgtctggggacagaaaaggctactggctgtgcttgaaattcgaattctgcctgggaatttttttttttctcccatcttcatttccttggaagccaaataggctgtcccagaagcttctgaattctactcttttcaacactaacacggaggaggaagagacccacccaggcagagagaagcctgctggacatgagacagcaggtactactgaccgggtcctgggtaccatagccagtccctaacctcaggacttcctgcattgaccttcatcccagagccttcctgcctgactctgccgcccccatcagaagccaggaaagtgactcgtgacattcggtactgatcttgctggatcttgaggccggcagctgccagtgatggatacccgctcatgcctttgccaaaacgtcacccgttcctggagggacaagcccaagtcgccattctcccttaatatttatcaagtgcctgagacaactggttgccttgctcaggagtcctggcctgctcagtgtcctgctgctcaggggtggccggcaggacccctgtcctgtgcccagcccccgagtctccgagtgaggcttgcacttctctctgcgcacttttcccgttctgtgctgggcacccacgtggtccacatttgtactcctaggttgcactgaccctggtgcattggatgggacctcaggccggaagtggccccgaatcattgaccacagaagataattgccaggctccaagcatccattgccttcttcagtactggggggaactcagggcctctgtctggtgtttagttagtctgtttgtttgtttgtttgtttgtttgtttggtggtttctggctctgcacagcagagttgtttagctcctctggtaacgtcatcctctctcacagagacatccagcctgctgaaggggagagatggggcgaggggagggatacacgcatggtttctcaggtgtggtggcacttggctttaatcctatgctcaagaggaagaggtgggcacatgtctgaggtccaagcctacatagtgagaccttatatatctaaaaaccaaaagaaatcccagactatttggtgggacttggaagaatacttagaaattgccacagatttgtcacatgggtaacctaagaagacagtggtggccttacttggattcctgggtagatccacctgtccactactcaagacacaagggcacactgcccagcccactgggacacttgtaaagagctctgtaatgtgccgatggcacctggctcggttttcattctgtatattcaaggatatcacacatatgtattaaatctatttatttttgcaaaccctgattgctgcacctctctgcaatttctccaggttaggctggggtgatactctgggatgctctgtatacaaagatgatttgaatgggctgatctcaggcctgtcctgtgcgttgctttgagtgggtgggaactgctttgaaacccttgttcagatgtttttataggctgaaaatatcatactgtgatggattaaattcttttttggaaaaaaaaaaaaaaaaaa

SEQ ID NO: 246 - RNA, 3288 nt, Homo sapiens
  source 1..3288: mol_type = mRNA
ccccgcgctgcgcggagcagggaccaggcggttgcggcggcgacagccatggccggcgcgctggcaggtctggccgcgggcttgcaggtcccgcgggtcgcgcccagcccagactcggactcggacacagactcggaggacccgagtctccggcgcagcgcgggcggcttgctccgctcgcaggtcatccacagcggtcacttcatggtgtcgtcgccgcacagcgactcgctgccccggcggcgcgaccaggaggggtccgtggggccctccgacttcgggccgcgcagtatcgaccccacactcacacgcctcttcgagtgcttgagcctggcctacagtggcaagctggtgtctcccaagtggaagaatttcaaaggcctcaagctgctctgcagagacaagatccgcctgaacaacgccatctggagggcctggtatatccagtatgtgaagcggaggaagagccccgtgtgtggcttcgtgacccccctgcaggggcctgaggctgatgcgcaccggaagccggaggccgtggtcctggaggggaactactggaagcggcgcatcgaggtggtgatgcgggaataccacaagtggcgcatctactacaagaagcggctccgtaagcccagcagggaagatgacctcctggcccctaagcaggcggaaggcaggtggccgccgccggagcaatggtgcaaacagctcttctccagtgtggtccccgtgctgctgggggacccagaggaggagccgggtgggcggcagctcctggacctcaattgctttttgtccgacatctcagacactctcttcaccatgactcagtccggcccttcgcccctgcagctgccgcctgaggatgcctacgtcggcaatgctgacatgatccagccggacctgacgccactgcagccaagcctggatgacttcatggacatctcagatttctttaccaactcccgcctcccacagccgcccatgccttcaaacttcccagagccccccagcttcagccccgtggttgactccctcttcagcagtgggaccctgggcccagaggtgcccccggcttcctcggccatgacccacctctctggacacagccgtctgcaggctcggaacagctgccctggccccttggactccagcgccttcctgagttctgatttcctccttcctgaagaccccaagccccggctcccaccccctcctgtacccccacctctgctgcattaccctccccctgccaaggtgccaggcctggagccctgccccccacctcccttccctcccatggcaccacccactgctttgctgcaggaagagcctctcttctctcccaggtttcccttccccaccgtccctcctgccccaggagtgtctccgctgcctgctcctgcagccttcccacccaccccacagtctgtccccagcccagcccccacccccttccccatagagcttctacccttggggtattcggagcctgcctttgggccttgcttctccatgcccagaggcaagccccccgccccatcccctaggggacagaaagccagcccccctaccttagcccctgccactgccagtccccccaccactgcggggagcaacaacccctgcctcacacagctgctcacagcagctaagccggagcaagccctggagccaccacttgtatccagcaccctcctccggtccccagggtccccgcaggagacagtccctgaattcccctgcacattccttcccccgaccccggcccctacaccgccccggccacctccaggcccggccacattggccccttccaggcccctgcttgtccccaaagcggagcggctctcacccccagcgcccagcggcagtgaacggcggctgtcaggggacctcagctccatgccaggccctgggactctgagcgtccgtgtctctcccccgcaacccatcctcagccggggccgtccagacagcaacaagaccgagaaccggcgtatcacacacatctccgcggagcagaagcggcgcttcaacatcaagctggggtttgacacccttcatgggctcgtgagcacactcagtgcccagcccagcctcaaggtgagcaaagctaccacgctgcagaagacagctgagtacatccttatgctacagcaggagcgtgcgggcttgcaggaggaggcccagcagctgcgggatgagattgaggagctcaatgccgccattaacctgtgccagcagcagctgcccgccacaggggtacccatcacacaccagcgttttgaccagatgcgagacatgtttgatgactacgtccgaacccgtacgctgcacaactggaagttctgggtgttcagcatcctcatccggcctctgtttgagtccttcaacgggatggtgtccacggcaagtgtgcacaccctccgccagacctcactggcctggctggaccagtactgctctctgcccgctctccggccaactgtcctgaactccctacgccagctgggcacatctaccagtatcctgaccgacccgggccgcatccctgagcaagccacacgggcagtcacagagggcacccttggcaaacctttatagtcctggccagaccctgctgctcactcagctgccctgggggctgctttccctgggcacgggctccagggatcatctctgggcactcccttcctgccccaggccctggctctgcccttccctggggggtggagcagggtccaggtttcacacttgccacctcctggaggtcaagaagagcagagtccccgtccctgctctgccactgtgctccagcaccgtgaccttgggtgactcgtccgctgtctttggaccgctgtgtttcaatctgcaaaatggggatggggaaggttcaatcagcagatgacccccaggccttggcagctgtgacattgggggcctaggctggcaactccgggggctcaacggtggaaagaggaggatgctgtttctctgtcacctccacttgctccccgacaggtggggcacagacctctgttcctgagcagagaagcagaaaaggaggttccctctctctgctccttcactgctgacccagaggggctgcaggatggtttcccctgggagaggccaggagggcctgatcccaggagacaccagggccagagtgaccacagcagggcaggcatcatgtgtgtgtgtgtgtgtggatgtgtgtgtgtgggttttgtaaagaattcttgaccaataaaagcaaaaactgtctgctggttaaaaaaaaaa

SEQ ID NO: 247 - RNA, 3649 nt, Mus musculus
  source 1..3649: mol_type = mRNA
agagcgcccgagagttggcgacaatagtggccatggcgcgcgcgctggcggatctatccgtgaacttgcaggtcccccgggtcgtccctagcccggactcggactcggatacggacttggaggatccgagtccccggcgcagcgcgggtggcctgcatcgatcacaggtcatccacagcggacacttcatggtgtcttcgccgcacagcgactcgctgacccggcgacgcgaccaggaggggcccgtggggctcgccgacttcgggccgcgcagcatcgatccgacactcacccacctcttcgagtgcttgagcctggcttacagtggcaagctggtctctcccaagtggaagaacttcaaaggcctcaagttgctatgccgggacaagatccggctgaacaacgccatctggagagcctggtacattcagtatgtgcaacggaggaagagcccagtgtgtggtttcgtgacccctctgcaggggtctgaagcagatgagcaccggaaacctgaggctgtcatcctggagggtaattactggaagcggcgcatcgaggtggtgatgcgcgaataccacaagtggagaatctactacaaaaagcggctccgtaagtccagcagggaaggggatttcctggctcccaagcaggtggaaggtgggtggccgccaccagagcgatggtgcgaacagctcttctccagcgtggtgcctgtgctgcttgggggctccgaggaggagcctgggggccggcagcttctagacctggactgcttcttgtccgatatctccgacacactcttcaccatgacacagcccagtccttcgtccctgcagctgcccccagaagatgcttatgttggcaatgctgacatgatccagccagacctgacgccgctgcagcccagcctagatgacttcatggagatatcagatttcttcaccaattaccgcccccctcagacacccacatcttcaaactacatagagtcccccagctttggccccatggctgactccctcttcagcagtgggatcctggccccagagatgccatctccagcctcgtcttcctcctcctcagggatgacccctcactcagggaatacacgcctacaggctcggaacagctgctctggacccttggatcccaacccctttctgagctctgaattccttcttcctgaagaccctaagaccaagatcccacctgctcctggaccgacccctctccttccattccccacccctgtcaaggtgcatggcttagagccctgcaccccctctcccttccccacaatggctccgcccccctctttgttgccagaagaatctctcctctctgccaggttcccattcacctcagcccctcctgctccaggagtgtctacgcttcctgcacccacaacctttgtccccaccccacagcccggccctggtcccgtccccttctctgtagaccatctgccccatgggtacctggaacccgtctttgggcctcacttcactgtgcctcagggtatgcaacccaggtgcaagccctcctccccatcccctgggggacaaaaagcaagtccacccaccttggcctctgccaccgccagtcccactgccactgccactgccagagacaacaacccctgtcttacacagctgctcagggcagccaagcctgagcaagcactggagcctccgactatgcccggtaccctcctccggcctccagagtccccgcaggatacagtttctgaaatcccccgtgcccgtgcctttttccccccaatcccggcccctacaccaccccggccacctccaggcccagccacattggctcctcccaggtccctggttgtccccaaagcagagcggctctcgcctccagcctccagcggcagtgagcggcgactatcaggggatctcaactccatacaaccctcgggggcactgagtgtccacctgtctccccctcaaactgtcctaagccggggtcgtgtagacaacaacaagatggagaaccgacgtatcacacacatctccgcggagcagaagaggcggttcaatattaagctaggattcgacaccctgcacggacttgtcagcacgctcagtgcccagcccagcctcaaggtgagcaaagcaaccacgcttcagaagacagcggagtacatcctgatgctgcagcaggaacgggcagctatgcaggaggaggcgcagcagctgcgggatgaaatagaggagctcaacgctgccatcaacttgtgccagcagcagctaccggccaccggggtgcccatcacacatcagcgctttgaccagatgcgggacatgtttgatgactatgtccggacgcgcacgctgcacaactggaagttctgggtgttcagcatcctcatccgacctttatttgaatccttcaatgggatggtgtctaccgccagcttgcacagcctccgccagacctcactggcctggctggaacagtactgttccctacctgctctccggccaactgtcctgaattcccttcgccaactcagcacttccacaagcatcctgactgaccccagccttgtgcctgagcaagccacacgggcagtcacagagggcaccctggggagaccattataatcctggtgaaagtttccaagctccaggaacaacttgtgaacacgcttctaaaaatcctggctggccgtttccctgcagatctggaaggttccaagtgttgcactcaccacctccttggggatggagaaaaacctagttccattcctgcactgttgctaatgctatgatccctggtgactcatatcccatctttggacctccctttaataacagagggccccaaatgcattagcagctgcagcactggggacctaaacaggagctctgatgagagatgtcggtctgtttcctcacaacttcctgctttggataaagggtaccatccttagttcctgagcagagaggcagagcaggagatctcctctctttgcctttgcactagtgacatggggagctatagggtggcttcctgactgaggccactggggtctgatgccagaagagatcagggcaagggctagccagagcatggcaggcatcttgcatgaatgtagatgtgtgtgtgcgtatgtggattttataaaaaagaaaatgttcttcatcaataaaagcaaaaactgtctgcaagggttggtgttggtgtgactggcaatgtgtctcagtatgggactcagagctgccagcagtgaaaggtgacatagaagaccgatcctgtgggttataaacaacctttgagtacttttgatttgttatttttgtttttgttttttcgagacagggttttttttgtgtagccctggctgtcctggaacttactggataggccaggctggcctccaactcagagatccacccacccctgcctctggaatactggaattaaaggcatatgtcaccaccacccggccctttgagtacttttcaacttgcttgtgtgcagttgtgctcacctgtgcttgtgtgtggaggccgtcggctgacctgggtacctccttcgtgctctctgccttaattttaaaatgcttccgaatatattctagaactgggcatggtgatgcacacctttaatcccagtacttggg

SEQ ID NO: 248 - RNA, 281 nt, Homo sapiens
  source 1..281: mol_type = genomic RNA
ttgtttgaatgaggcttcagtactttacagaatcgttgcctgcacatcttggaaacacttgctgggattacttcttcaggttaacccaacagaaggctcgagaaggtatattgctgttgacagtgagcgcggcggtcattgtcactggtcatagtgaagccacagatgtatgaccagtgacaatgaccgccttgcctactgcctcggaattcaaggggctactttaggagcaattatcttgtttactaaaactgaataccttgctatctctttgatacatt

SEQ ID NO: 249 - RNA, 21 nt, synthetic construct
  modified_base 21: mod_base = OTHER; note = 2'-OMe modified nucleotide
  source 1..21: mol_type = other RNA
cggtcattgtcactggtcatt

SEQ ID NO: 250 - RNA, 21 nt, synthetic construct
  modified_base 21: mod_base = OTHER; note = 2'-OMe modified nucleotide
  source 1..21: mol_type = other RNA
tgaccagtgacaatgaccgtt

SEQ ID NO: 251 - protein, 358 aa, Homo sapiens
MESADFYEAEPRPPMSSHLQSPPHAPSSAAFGFPRGAGPAQPPAPPAAPEPLGGICEHETSIDISAYIDPAAFNDEFLADLFQHSRQQEKAKAAVGPTGGGGGGDFDYPGAPAGPGGAVMPGGAHGPPPGYGCAAAGYLDGRLEPLYERVGAPALRPLVIKQEPREEDEAKQLALAGLFPYQPPPPPPPSHPHPHPPPAHLAAPHLQFQIAHCGQTTMHLQPGHPTPPPTPVPSPHPAPALGAAGLPGPGSALKGLGAAHPDLRASGGSGAGKAKKSVDKNSNEYRVRRERNNIAVRKSRDKAKQRNVETQQKVLELTSDNDRLRKRVEQLSRELDTLRGIFRQLPESSLVKAMGNCA

SEQ ID NO: 252 - protein, 239 aa, Homo sapiens
MPGGAHGPPPGYGCAAAGYLDGRLEPLYERVGAPALRPLVIKQEPREEDEAKQLALAGLFPYQPPPPPPPSHPHPHPPPAHLAAPHLQFQIAHCGQTTMHLQPGHPTPPPTPVPSPHPAPALGAAGLPGPGSALKGLGAAHPDLRASGGSGAGKAKKSVDKNSNEYRVRRERNNIAVRKSRDKAKQRNVETQQKVLELTSDNDRLRKRVEQLSRELDTLRGIFRQLPESSLVKAMGNCA

SEQ ID NO: 253 - DNA, 19 bp, synthetic construct
  source 1..19: mol_type = other DNA
ctgagtaatcgcttaaaga

SEQ ID NO: 254 - DNA, 19 bp, synthetic construct
  source 1..19: mol_type = other DNA
gaaactttagcgagtcaga

SEQ ID NO: 255 - RNA, 21 nt, synthetic construct
  source 1..21: mol_type = other RNA
tctactgtcactcagtagttt

SEQ ID NO: 256 - RNA, 21 nt, synthetic construct
  source 1..21: mol_type = other RNA
cggtcattgtcactggtcatt

SEQ ID NO: 257 - RNA, 21 nt, synthetic construct
  source 1..21: mol_type = other RNA
tgaccagtgacaatgaccgtt

SEQ ID NO: 258 - RNA, 22 nt, synthetic construct
  modified_base 1: mod_base = OTHER; note = Inverted abasic nucleotide
  source 1..22: mol_type = other RNA
ncggtcattgtcactggtcatt

SEQ ID NO: 259 - RNA, 22 nt, synthetic construct
  modified_base 1: mod_base = OTHER; note = Inverted abasic nucleotide
  source 1..22: mol_type = other RNA
ntgaccagtgacaatgaccgtt

SEQ ID NO: 260 - RNA, 21 nt, synthetic construct
  source 1..21: mol_type = other RNA
cggtcattcagactggtcatt

SEQ ID NO: 261 - RNA, 21 nt, synthetic construct
  source 1..21: mol_type = other RNA
tgaccagtctgaatgaccgtt

SEQ ID NO: 262 - RNA, 21 nt, synthetic construct
  modified_base 21: mod_base = OTHER; note = 2'-OMe modified nucleotide
  source 1..21: mol_type = other RNA
actactgagtgacagtagatt

SEQ ID NO: 263 - RNA, 21 nt, synthetic construct
  modified_base 2: mod_base = OTHER; note = 2'-OMe modified nucleotide
  modified_base 4: mod_base = OTHER; note = 2'-OMe modified nucleotide
  modified_base 6: mod_base = OTHER; note = 2'-OMe modified nucleotide
  modified_base 8: mod_base = OTHER; note = 2'-OMe modified nucleotide
  modified_base 10: mod_base = OTHER; note = 2'-OMe modified nucleotide
  modified_base 12: mod_base = OTHER; note = 2'-OMe modified nucleotide
  modified_base 14: mod_base = OTHER; note = 2'-OMe modified nucleotide
  modified_base 16: mod_base = OTHER; note = 2'-OMe modified nucleotide
  modified_base 19..21: mod_base = OTHER; note = 2'-OMe modified nucleotide
  source 1..21: mol_type = other RNA
cggtcattgtcactggtcatt

SEQ ID NO: 264 - RNA, 21 nt, synthetic construct
  modified_base 2: mod_base = OTHER; note = 2'-OMe modified nucleotide
  modified_base 7: mod_base = OTHER; note = 2'-OMe modified nucleotide
  modified_base 9: mod_base = OTHER; note = 2'-OMe modified nucleotide
  modified_base 14: mod_base = OTHER; note = 2'-OMe modified nucleotide
  modified_base 16: mod_base = OTHER; note = 2'-OMe modified nucleotide
  modified_base 20..21: mod_base = OTHER; note = 2'-OMe modified nucleotide
  source 1..21: mol_type = other RNA
cggtcattgtcactggtcatt

SEQ ID NO: 265 - RNA, 21 nt, synthetic construct
  modified_base 1: mod_base = OTHER; note = 2'-OMe modified nucleotide
  modified_base 4..5: mod_base = OTHER; note = 2'-OMe modified nucleotide
  modified_base 7..8: mod_base = OTHER; note = 2'-OMe modified nucleotide
  modified_base 10..11: mod_base = OTHER; note = 2'-OMe modified nucleotide
  modified_base 13..14: mod_base = OTHER; note = 2'-OMe modified nucleotide
  modified_base 17..18: mod_base = OTHER; note = 2'-OMe modified nucleotide
  modified_base 20..21: mod_base = OTHER; note = 2'-OMe modified nucleotide
  source 1..21: mol_type = other RNA
cggtcattgtcactggtcatt

SEQ ID NO: 266 - RNA, 21 nt, synthetic construct
  modified_base 4: mod_base = OTHER; note = 2'-OMe modified nucleotide
  modified_base 7..8: mod_base = OTHER; note = 2'-OMe modified nucleotide
  modified_base 10: mod_base = OTHER; note = 2'-OMe modified nucleotide
  modified_base 14: mod_base = OTHER; note = 2'-OMe modified nucleotide
  modified_base 17: mod_base = OTHER; note = 2'-OMe modified nucleotide
  modified_base 20..21: mod_base = OTHER; note = 2'-OMe modified nucleotide
  source 1..21: mol_type = other RNA
cggtcattgtcactggtcatt

SEQ ID NO: 267 - RNA, 21 nt, synthetic construct
  modified_base 6: mod_base = OTHER; note = 2'-OMe modified nucleotide
  modified_base 15: mod_base = OTHER; note = 2'-OMe modified nucleotide
  modified_base 20..21: mod_base = OTHER; note = 2'-OMe modified nucleotide
  source 1..21: mol_type = other RNA
cggtcattgtcactggtcatt

SEQ ID NO: 268 - RNA, 21 nt, synthetic construct
  modified_base 4: mod_base = OTHER; note = 2'-OMe modified nucleotide
  modified_base 6: mod_base = OTHER; note = 2'-OMe modified nucleotide
  modified_base 14..15: mod_base = OTHER; note = 2'-OMe modified nucleotide
  modified_base 20..21: mod_base = OTHER; note = 2'-OMe modified nucleotide
  source 1..21: mol_type = other RNA
cggtcattgtcactggtcatt

SEQ ID NO: 269 - RNA, 21 nt, synthetic construct
  modified_base 20..21: mod_base = OTHER; note = 2'-OMe modified nucleotide
  source 1..21: mol_type = other RNA
cggtcattgtcactggtcttt

SEQ ID NO: 270 - RNA, 21 nt, synthetic construct
  modified_base 4: mod_base = OTHER; note = 2'-OMe modified nucleotide
  modified_base 7..8: mod_base = OTHER; note = 2'-OMe modified nucleotide
  modified_base 10: mod_base = OTHER; note = 2'-OMe modified nucleotide
  modified_base 14: mod_base = OTHER; note = 2'-OMe modified nucleotide
  modified_base 17: mod_base = OTHER; note = 2'-OMe modified nucleotide
  modified_base 20..21: mod_base = OTHER; note = 2'-OMe modified nucleotide
  source 1..21: mol_type = other RNA
cggtcattgtcactggtcttt

SEQ ID NO: 271 - RNA, 21 nt, synthetic construct
  modified_base 21: mod_base = OTHER; note = 2'-OMe modified nucleotide
  source 1..21: mol_type = other RNA
tctactgtcactcagtagttt

SEQ ID NO: 272 - RNA, 21 nt, synthetic construct
  modified_base 21: mod_base = OTHER; note = 2'-OMe modified nucleotide
  source 1..21: mol_type = other RNA
tgaccagtgacaatgaccgtt

SEQ ID NO: 273 - RNA, 21 nt, synthetic construct
  modified_base 20..21: mod_base = OTHER; note = 2'-OMe modified nucleotide
  source 1..21: mol_type = other RNA
tgaccagtgacaatgaccgtt

SEQ ID NO: 274 - RNA, 21 nt, synthetic construct
  modified_base 1: mod_base = OTHER; note = 2'-OMe modified nucleotide
  modified_base 3: mod_base = OTHER; note = 2'-OMe modified nucleotide
  modified_base 6: mod_base = OTHER; note = 2'-OMe modified nucleotide
  modified_base 8: mod_base = OTHER; note = 2'-OMe modified nucleotide
  modified_base 10: mod_base = OTHER; note = 2'-OMe modified nucleotide
  modified_base 12: mod_base = OTHER; note = 2'-OMe modified nucleotide
  modified_base 14: mod_base = OTHER; note = 2'-OMe modified nucleotide
  modified_base 16: mod_base = OTHER; note = 2'-OMe modified nucleotide
  modified_base 19..21: mod_base = OTHER; note = 2'-OMe modified nucleotide
  source 1..21: mol_type = other RNA
tgaccagtgacaatgaccgtt

SEQ ID NO: 275 - RNA, 21 nt, synthetic construct
  modified_base 2: mod_base = OTHER; note = 2'-OMe modified nucleotide
  modified_base 6: mod_base = OTHER; note = 2'-OMe modified nucleotide
  modified_base 9: mod_base = OTHER; note = 2'-OMe modified nucleotide
  modified_base 14: mod_base = OTHER; note = 2'-OMe modified nucleotide
  modified_base 19..21: mod_base = OTHER; note = 2'-OMe modified nucleotide
  source 1..21: mol_type = other RNA
tgaccagtgacaatgaccgtt

SEQ ID NO: 276 - RNA, 21 nt, synthetic construct
  modified_base 1: mod_base = OTHER; note = 2'-OMe modified nucleotide
  modified_base 8: mod_base = OTHER; note = 2'-OMe modified nucleotide
  modified_base 14: mod_base = OTHER; note = 2'-OMe modified nucleotide
  modified_base 20..21: mod_base = OTHER; note = 2'-OMe modified nucleotide
  source 1..21: mol_type = other RNA
tgaccagtgacaatgaccgtt

SEQ ID NO: 277 - RNA, 21 nt, synthetic construct
  modified_base 6: mod_base = OTHER; note = 2'-OMe modified nucleotide
  modified_base 15: mod_base = OTHER; note = 2'-OMe modified nucleotide
  modified_base 20..21: mod_base = OTHER; note = 2'-OMe modified nucleotide
  source 1..21: mol_type = other RNA
tgaccagtgacaatgaccgtt

SEQ ID NO: 278 - RNA, 21 nt, synthetic construct
  source 1..21: mol_type = other RNA
gtcactggtcagctccagctt

SEQ ID NO: 279 - RNA, 21 nt, synthetic construct
  source 1..21: mol_type = other RNA
cattgtcactggtcagctctt

SEQ ID NO: 280 - RNA, 21 nt, synthetic construct
  source 1..21: mol_type = other RNA
gcggtcattgtcactggtctt

SEQ ID NO: 281 - RNA, 21 nt, synthetic construct
  source 1..21: mol_type = other RNA
ggcggtcattgtcactggttt

SEQ ID NO: 282 - RNA, 21 nt, synthetic construct
  source 1..21: mol_type = other RNA
aggcggtcattgtcactggtt

SEQ ID NO: 283 - RNA, 21 nt, synthetic construct
  source 1..21: mol_type = other RNA
caggcggtcattgtcactgtt

SEQ ID NO: 284 - RNA, 21 nt, synthetic construct
  source 1..21: mol_type = other RNA
gcaggcggtcattgtcacttt

SEQ ID NO: 285 - RNA, 21 nt, synthetic construct
  source 1..21: mol_type = other RNA
cgcaggcggtcattgtcactt

SEQ ID NO: 286 - RNA, 21 nt, synthetic construct
  source 1..21: mol_type = other RNA
gcgcaggcggtcattgtcatt

SEQ ID NO: 287 - RNA, 21 nt, synthetic construct
  source 1..21: mol_type = other RNA
tgcgcaggcggtcattgtctt

SEQ ID NO: 288 - RNA, 21 nt, synthetic construct
  source 1..21: mol_type = other RNA
ttgcgcaggcggtcattgttt

SEQ ID NO: 289 - RNA, 21 nt, synthetic construct
  source 1..21: mol_type = other RNA
attcatcctcctcgcggggtt

SEQ ID NO: 290 - RNA, 21 nt, synthetic construct
  source 1..21: mol_type = other RNA
gattcatcctcctcgcgggtt

SEQ ID NO: 291 - RNA, 21 nt, synthetic construct
  source 1..21: mol_type = other RNA
ggattcatcctcctcgcggtt

SEQ ID NO: 292 - RNA, 21 nt, synthetic construct
  source 1..21: mol_type = other RNA
aggattcatcctcctcgcgtt

SEQ ID NO: 293 - RNA, 21 nt, synthetic construct
  source 1..21: mol_type = other RNA
aaggattcatcctcctcgctt

SEQ ID NO: 294 - RNA, 21 nt, synthetic construct
  source 1..21: mol_type = other RNA
aaaggattcatcctcctcgtt

SEQ ID NO: 295 - RNA, 21 nt, synthetic construct
  source 1..21: mol_type = other RNA
tgaaaggattcatcctccttt

SEQ ID NO: 296 - RNA, 21 nt, synthetic construct
  source 1..21: mol_type = other RNA
ctgaaaggattcatcctcctt

SEQ ID NO: 297 - RNA, 21 nt, synthetic construct
  source 1..21: mol_type = other RNA
gctgaaaggattcatcctctt

SEQ ID NO: 298 - RNA, 21 nt, synthetic construct
  source 1..21: mol_type = other RNA
agctgaaaggattcatccttt

SEQ ID NO: 299 - RNA, 21 nt, synthetic construct
  source 1..21: mol_type = other RNA
cagctgaaaggattcatcctt

SEQ ID NO: 300 - RNA, 21 nt, synthetic construct
  source 1..21: mol_type = other RNA
ccagctgaaaggattcatctt

SEQ ID NO: 301 - RNA, 21 nt, synthetic construct
  source 1..21: mol_type = other RNA
gccagctgaaaggattcattt

SEQ ID NO: 302 - RNA, 21 nt, synthetic construct
  source 1..21: mol_type = other RNA
cgccagctgaaaggattcatt

SEQ ID NO: 303 - RNA, 21 nt, synthetic construct
  source 1..21: mol_type = other RNA
gcgccagctgaaaggattctt

SEQ ID NO: 304 - RNA, 21 nt, synthetic construct
  source 1..21: mol_type = other RNA
agcgccagctgaaaggatttt

SEQ ID NO: 305 - RNA, 21 nt, synthetic construct
  source 1..21: mol_type = other RNA
cagcgccagctgaaaggattt

SEQ ID NO: 306 - RNA, 21 nt, synthetic construct
  source 1..21: mol_type = other RNA
ccagcgccagctgaaaggatt

SEQ ID NO: 307 - RNA, 21 nt, synthetic construct
  source 1..21: mol_type = other RNA
gccagcgccagctgaaaggtt

SEQ ID NO: 308 - RNA, 21 nt, synthetic construct
  source 1..21: mol_type = other RNA
ggccagcgccagctgaaagtt

SEQ ID NO: 309 - RNA, 21 nt, synthetic construct
  source 1..21: mol_type = other RNA
cttcatcctcctcgcggggtt

SEQ ID NO: 310 - RNA, 21 nt, synthetic construct
  source 1..21: mol_type = other RNA
ggcttcatcctcctcgcggtt

SEQ ID NO: 311 - RNA, 21 nt, synthetic construct
  source 1..21: mol_type = other RNA
agctgcttggcttcatccttt

SEQ ID NO: 312 - RNA, 21 nt, synthetic construct
  source 1..21: mol_type = other RNA
cgccagctgcttggcttcatt

SEQ ID NO: 313 - RNA, 21 nt, synthetic construct
  source 1..21: mol_type = other RNA
agcgccagctgcttggctttt

SEQ ID NO: 314 - RNA, 21 nt, synthetic construct
  modified_base 2: mod_base = OTHER; note = 2'-OMe modified nucleotide
  modified_base 7: mod_base = OTHER; note = 2'-OMe modified nucleotide
  misc_feature 19..21: note = Phosphorothioate linkage
  modified_base 20..21: mod_base = OTHER; note = 2'-OMe modified nucleotide
  source 1..21: mol_type = other RNA
cttacgctgagtacttcgatt

SEQ ID NO: 315 - DNA, 21 bp, synthetic construct
  modified_base 4: mod_base = OTHER; note = 2'-OMe modified nucleotide
  modified_base 9: mod_base = OTHER; note = 2'-OMe modified nucleotide
  modified_base 15..16: mod_base = OTHER; note = 2'-OMe modified nucleotide
  modified_base 19: mod_base = OTHER; note = 2'-OMe modified nucleotide
  misc_feature 20..21: note = Phosphorothioate linkage
  misc_feature 1..19: note = RNA
  misc_feature 20..21: note = DNA
  source 1..21: mol_type = other DNA
ggatgaagtggagattagttt

SEQ ID NO: 316 - RNA, 21 nt, synthetic construct
  source 1..21: mol_type = other RNA
gctggagctgaccagtgactt

SEQ ID NO: 317 - RNA, 21 nt, synthetic construct
  source 1..21: mol_type = other RNA
gagctgaccagtgacaatgtt

SEQ ID NO: 318 - RNA, 21 nt, synthetic construct
  source 1..21: mol_type = other RNA
gaccagtgacaatgaccgctt

SEQ ID NO: 319 - RNA, 21 nt, synthetic construct
  source 1..21: mol_type = other RNA
accagtgacaatgaccgcctt

SEQ ID NO: 320 - RNA, 21 nt, synthetic construct
  source 1..21: mol_type = other RNA
ccagtgacaatgaccgccttt

SEQ ID NO: 321 - RNA, 21 nt, synthetic construct
  source 1..21: mol_type = other RNA
cagtgacaatgaccgcctgtt

SEQ ID NO: 322 - RNA, 21 nt, synthetic construct
  source 1..21: mol_type = other RNA
agtgacaatgaccgcctgctt

SEQ ID NO: 323 - RNA, 21 nt, synthetic construct
  source 1..21: mol_type = other RNA
gtgacaatgaccgcctgcgtt

SEQ ID NO: 324 - RNA, 21 nt, synthetic construct
  source 1..21: mol_type = other RNA
tgacaatgaccgcctgcgctt

SEQ ID NO: 325 - RNA, 21 nt, synthetic construct
  source 1..21: mol_type = other RNA
gacaatgaccgcctgcgcatt

SEQ ID NO: 326 - RNA, 21 nt, synthetic construct
  source 1..21: mol_type = other RNA
acaatgaccgcctgcgcaatt

SEQ ID NO: 327 - RNA, 21 nt, synthetic construct
  source 1..21: mol_type = other RNA
ccccgcgaggaggatgaattt

SEQ ID NO: 328 - RNA, 21 nt, synthetic construct
  source 1..21: mol_type = other RNA
cccgcgaggaggatgaatctt

SEQ ID NO: 329 - RNA, 21 nt, synthetic construct
  source 1..21: mol_type = other RNA
ccgcgaggaggatgaatcctt

SEQ ID NO: 330 - RNA, 21 nt, synthetic construct
  source 1..21: mol_type = other RNA
cgcgaggaggatgaatccttt

SEQ ID NO: 331 - RNA, 21 nt, synthetic construct
  source 1..21: mol_type = other RNA
gcgaggaggatgaatcctttt

SEQ ID NO: 332 - RNA, 21 nt, synthetic construct
  source 1..21: mol_type = other RNA
cgaggaggatgaatccttttt

SEQ ID NO: 333 - RNA, 21 nt, synthetic construct
  source 1..21: mol_type = other RNA
aggaggatgaatcctttcatt

SEQ ID NO: 334 - RNA, 21 nt, synthetic construct
  source 1..21: mol_type = other RNA
ggaggatgaatcctttcagtt

SEQ ID NO: 335 - RNA, 21 nt, synthetic construct
  source 1..21: mol_type = other RNA
gaggatgaatcctttcagctt

SEQ ID NO: 336 - RNA, 21 nt, synthetic construct
  source 1..21: mol_type = other RNA
aggatgaatcctttcagcttt

SEQ ID NO: 337 - RNA, 21 nt, synthetic construct
  source 1..21: mol_type = other RNA
ggatgaatcctttcagctgtt

SEQ ID NO: 338 - RNA, 21 nt, synthetic construct
  source 1..21: mol_type = other RNA
gatgaatcctttcagctggtt

SEQ ID NO: 339 - RNA, 21 nt, synthetic construct
  source 1..21: mol_type = other RNA
atgaatcctttcagctggctt

SEQ ID NO: 340 - RNA, 21 nt, synthetic construct
  source 1..21: mol_type = other RNA
tgaatcctttcagctggcgtt

SEQ ID NO: 341 - RNA, 21 nt, synthetic construct
  source 1..21: mol_type = other RNA
gaatcctttcagctggcgctt

SEQ ID NO: 342 - RNA, 21 nt, synthetic construct
  source 1..21: mol_type = other RNA
aatcctttcagctggcgcttt

SEQ ID NO: 343 - RNA, 21 nt, synthetic construct
  source 1..21: mol_type = other RNA
atcctttcagctggcgctgtt

SEQ ID NO: 344 - RNA, 21 nt, synthetic construct
  source 1..21: mol_type = other RNA
tcctttcagctggcgctggtt

SEQ ID NO: 345 - RNA, 21 nt, synthetic construct
  source 1..21: mol_type = other RNA
cctttcagctggcgctggctt

SEQ ID NO: 346 - RNA, 21 nt, synthetic construct
  source 1..21: mol_type = other RNA
ctttcagctggcgctggcctt

SEQ ID NO: 347 - RNA, 21 nt, synthetic construct
  source 1..21: mol_type = other RNA
ccccgcgaggaggatgaagtt

SEQ ID NO: 348 - RNA, 21 nt, synthetic construct
  source 1..21: mol_type = other RNA
ccgcgaggaggatgaagcctt

SEQ ID NO: 349 - RNA, 21 nt, synthetic construct
  source 1..21: mol_type = other RNA
aggatgaagccaagcagcttt

SEQ ID NO: 350 - RNA, 21 nt, synthetic construct
  source 1..21: mol_type = other RNA
tgaagccaagcagctggcgtt

SEQ ID NO: 351 - RNA, 21 nt, synthetic construct
  source 1..21: mol_type = other RNA
aagccaagcagctggcgcttt

SEQ ID NO: 352 - RNA, 21 nt, synthetic construct
  modified_base 2: mod_base = OTHER; note = 2'-OMe modified nucleotide
  modified_base 7: mod_base = OTHER; note = 2'-OMe modified nucleotide
  modified_base 9: mod_base = OTHER; note = 2'-OMe modified nucleotide
  modified_base 14: mod_base = OTHER; note = 2'-OMe modified nucleotide
  misc_feature 19..21: note = Phosphorothioate linkage
  modified_base 19..21: mod_base = OTHER; note = 2'-OMe modified nucleotide
  source 1..21: mol_type = other RNA
tcgaagtactcagcgtaagtt

SEQ ID NO: 353 - DNA, 21 bp, synthetic construct
  modified_base 3: mod_base = OTHER; note = 2'-OMe modified nucleotide
  modified_base 10: mod_base = OTHER; note = 2'-OMe modified nucleotide
  modified_base 15: mod_base = OTHER; note = 2'-OMe modified nucleotide
  misc_feature 20..21: note = Phosphorothioate linkage
  misc_feature 1..19: note = RNA
  misc_feature 20..21: note = DNA
  source 1..21: mol_type = other DNA
actaatctccacttcatcctt

SEQ ID NO: 354 - RNA, 22 nt, synthetic construct
  modified_base 1: mod_base = OTHER; note = Inverted abasic nucleotide
  source 1..22: mol_type = other RNA
ngcggtcattgtcactggtctt

SEQ ID NO: 355 - RNA, 22 nt, synthetic construct
  modified_base 1: mod_base = OTHER; note = Inverted abasic modification
  source 1..22: mol_type = other RNA
ntgaaaggattcatcctccttt

SEQ ID NO: 356 - RNA, 22 nt, synthetic construct
  modified_base 1: mod_base = OTHER; note = Inverted abasic modification
  source 1..22: mol_type = other RNA
nctgaaaggattcatcctcctt

SEQ ID NO: 357 - RNA, 22 nt, synthetic construct
  modified_base 1: mod_base = OTHER; note = Inverted abasic nucleotide
  source 1..22: mol_type = other RNA
nggccagcgccagctgaaagtt

SEQ ID NO: 358 - RNA, 22 nt, synthetic construct
  modified_base 1: mod_base = OTHER; note = Inverted abasic nucleotide
  modified_base 3: mod_base = OTHER; note = 2'-OMe modified nucleotide
  modified_base 5: mod_base = OTHER; note = 2'-OMe modified nucleotide
  modified_base 7: mod_base = OTHER; note = 2'-OMe modified nucleotide
  modified_base 9: mod_base = OTHER; note = 2'-OMe modified nucleotide
  modified_base 11: mod_base = OTHER; note = 2'-OMe modified nucleotide
  modified_base 13: mod_base = OTHER; note = 2'-OMe modified nucleotide
  modified_base 15: mod_base = OTHER; note = 2'-OMe modified nucleotide
  modified_base 17: mod_base = OTHER; note = 2'-OMe modified nucleotide
  modified_base 20..22: mod_base = OTHER; note = 2'-OMe modified nucleotide
  source 1..22: mol_type = other RNA
ncggtcattgtcactggtcatt

SEQ ID NO: 359 - RNA, 22 nt, synthetic construct
  modified_base 1: mod_base = OTHER; note = Inverted abasic nucleotide
  modified_base 4: mod_base = OTHER; note = 2'-OMe modified nucleotide
  modified_base 6: mod_base = OTHER; note = 2'-OMe modified nucleotide
  modified_base 8: mod_base = OTHER; note = 2'-OMe modified nucleotide
  modified_base 10: mod_base = OTHER; note = 2'-OMe modified nucleotide
  modified_base 12: mod_base = OTHER; note = 2'-OMe modified nucleotide
  modified_base 14: mod_base = OTHER; note = 2'-OMe modified nucleotide
  modified_base 16: mod_base = OTHER; note = 2'-OMe modified nucleotide
  modified_base 18: mod_base = OTHER; note = 2'-OMe modified nucleotide
  modified_base 21..22: mod_base = OTHER; note = 2'-OMe modified nucleotide
  source 1..22: mol_type = other RNA
ngcggtcattgtcactggtctt

SEQ ID NO: 360 - RNA, 22 nt, synthetic construct
  modified_base 1: mod_base = OTHER; note = Inverted abasic nucleotide
  modified_base 3: mod_base = OTHER; note = 2'-OMe modified nucleotide
  modified_base 5: mod_base = OTHER; note = 2'-OMe modified nucleotide
  modified_base 7: mod_base = OTHER; note = 2'-OMe modified nucleotide
  modified_base 9: mod_base = OTHER; note = 2'-OMe modified nucleotide
  modified_base 11: mod_base = OTHER; note = 2'-OMe modified nucleotide
  modified_base 14: mod_base = OTHER; note = 2'-OMe modified nucleotide
  modified_base 17: mod_base = OTHER; note = 2'-OMe modified nucleotide
  modified_base 20..22: mod_base = OTHER; note = 2'-OMe modified nucleotide
  source 1..22: mol_type = other RNA
ntgaaaggattcatcctccttt

SEQ ID NO: 361 - RNA, 22 nt, synthetic construct
  modified_base 1: mod_base = OTHER; note = Inverted abasic nucleotide
  modified_base 3: mod_base = OTHER; note = 2'-OMe modified nucleotide
  modified_base 5: mod_base = OTHER; note = 2'-OMe modified nucleotide
  modified_base 7: mod_base = OTHER; note = 2'-OMe modified nucleotide
  modified_base 9: mod_base = OTHER; note = 2'-OMe modified nucleotide
  modified_base 11..12: mod_base = OTHER; note = 2'-OMe modified nucleotide
  modified_base 15: mod_base = OTHER; note = 2'-OMe modified nucleotide
  modified_base 18: mod_base = OTHER; note = 2'-OMe modified nucleotide
  modified_base 21..22: mod_base = OTHER; note = 2'-OMe modified nucleotide
  source 1..22: mol_type = other RNA
nctgaaaggattcatcctcctt

SEQ ID NO: 362 - RNA, 22 nt, synthetic construct
  modified_base 1: mod_base = OTHER; note = Inverted abasic nucleotide
  modified_base 3: mod_base = OTHER; note = 2'-OMe modified nucleotide
  modified_base 7: mod_base = OTHER; note = 2'-OMe modified nucleotide
  modified_base 9: mod_base = OTHER; note = 2'-OMe modified nucleotide
  modified_base 13: mod_base = OTHER; note = 2'-OMe modified nucleotide
  modified_base 15: mod_base = OTHER; note = 2'-OMe modified nucleotide
  modified_base 17: mod_base = OTHER; note = 2'-OMe modified nucleotide
  modified_base 19: mod_base = OTHER; note = 2'-OMe modified nucleotide
  modified_base 21..22: mod_base = OTHER; note = 2'-OMe modified nucleotide
  source 1..22: mol_type = other RNA
nggccagcgccagctgaaagtt

SEQ ID NO: 363 - RNA, 22 nt, synthetic construct
  modified_base 1: mod_base = OTHER; note = Inverted abasic nucleotide
  modified_base 2..3: mod_base = OTHER; note = 2'-OMe modified nucleotide
  modified_base 5: mod_base = OTHER; note = 2'-OMe modified nucleotide
  modified_base 11: mod_base = OTHER; note = 2'-OMe modified nucleotide
  modified_base 15: mod_base = OTHER; note = 2'-OMe modified nucleotide
  modified_base 21..22: mod_base = OTHER; note = 2'-OMe modified nucleotide
  source 1..22: mol_type = other RNA
ncggtcattgtcactggtcatt

SEQ ID NO: 364 - RNA, 22 nt, synthetic construct
  modified_base 1: mod_base = OTHER; note = Inverted abasic nucleotide
  modified_base 2..3: mod_base = OTHER; note = 2'-OMe modified nucleotide
  modified_base 5: mod_base = OTHER; note = 2'-OMe modified nucleotide
  modified_base 11: mod_base = OTHER; note = 2'-OMe modified nucleotide
  modified_base 15: mod_base = OTHER; note = 2'-OMe modified nucleotide
  modified_base 21..22: mod_base = OTHER; note = 2'-OMe modified nucleotide
  source 1..22: mol_type = other RNA
ngcggtcattgtcactggtctt

SEQ ID NO: 365 - RNA, 22 nt, synthetic construct
  modified_base 1: mod_base = OTHER; note = Inverted abasic nucleotide
  modified_base 2..3: mod_base = OTHER; note = 2'-OMe modified nucleotide
  modified_base 5: mod_base = OTHER; note = 2'-OMe modified nucleotide
  modified_base 11: mod_base = OTHER; note = 2'-OMe modified nucleotide
  modified_base 15: mod_base = OTHER; note = 2'-OMe modified nucleotide
  modified_base 21..22: mod_base = OTHER; note = 2'-OMe modified nucleotide
  source 1..22: mol_type = other RNA
ntgaaaggattcatcctccttt

SEQ ID NO: 366 - RNA, 22 nt, synthetic construct
  modified_base 1: mod_base = OTHER; note = Inverted abasic nucleotide
  modified_base 2..3: mod_base = OTHER; note = 2'-OMe modified nucleotide
  modified_base 5: mod_base = OTHER; note = 2'-OMe modified nucleotide
  modified_base 11: mod_base = OTHER; note = 2'-OMe modified nucleotide
  modified_base 15: mod_base = OTHER; note = 2'-OMe modified nucleotide
  modified_base 21..22: mod_base = OTHER; note = 2'-OMe modified nucleotide
  source 1..22: mol_type = other RNA
nctgaaaggattcatcctcctt

SEQ ID NO: 367 - RNA, 22 nt, synthetic construct
  modified_base 1: mod_base = OTHER; note = Inverted abasic nucleotide
  modified_base 2..3: mod_base = OTHER; note = 2'-OMe modified nucleotide
  modified_base 5: mod_base = OTHER; note = 2'-OMe modified nucleotide
  modified_base 11: mod_base = OTHER; note = 2'-OMe modified nucleotide
  modified_base 15: mod_base = OTHER; note = 2'-OMe modified nucleotide
  modified_base 21..22: mod_base = OTHER; note = 2'-OMe modified nucleotide
  source 1..22: mol_type = other RNA
nggccagcgccagctgaaagtt

SEQ ID NO: 368 - RNA, 22 nt, synthetic construct
  modified_base 1: mod_base = OTHER; note = Inverted abasic nucleotide
  modified_base 2..3: mod_base = OTHER; note = 2'-OMe modified nucleotide
  modified_base 5..6: mod_base = OTHER; note = 2'-OMe modified nucleotide
  modified_base 8..9: mod_base = OTHER; note = 2'-OMe modified nucleotide
  modified_base 11..12: mod_base = OTHER; note = 2'-OMe modified nucleotide
  modified_base 14..15: mod_base = OTHER; note = 2'-OMe modified nucleotide
  modified_base 18..19: mod_base = OTHER; note = 2'-OMe modified nucleotide
  modified_base 21..22: mod_base = OTHER; note = 2'-OMe modified nucleotide
  source 1..22: mol_type = other RNA
ncggtcattgtcactggtcatt

SEQ ID NO: 369 - RNA, 22 nt, synthetic construct
  modified_base 1: mod_base = OTHER; note = Inverted abasic nucleotide
  modified_base 2..3: mod_base = OTHER; note = 2'-OMe modified nucleotide
  modified_base 6..7: mod_base = OTHER; note = 2'-OMe modified nucleotide
  modified_base 9..10: mod_base = OTHER; note = 2'-OMe modified nucleotide
  modified_base 12..13: mod_base = OTHER; note = 2'-OMe modified nucleotide
  modified_base 15..16: mod_base = OTHER; note = 2'-OMe modified nucleotide
  modified_base 19..22: mod_base = OTHER; note = 2'-OMe modified nucleotide
  source 1..22: mol_type = other RNA
ngcggtcattgtcactggtctt

SEQ ID NO: 370 - RNA, 22 nt, synthetic construct
  modified_base 1: mod_base = OTHER; note = Inverted abasic nucleotide
  modified_base 2..3: mod_base = OTHER; note = 2'-OMe modified nucleotide
  modified_base 10..12: mod_base = OTHER; note = 2'-OMe modified nucleotide
  modified_base 14..22: mod_base = OTHER; note = 2'-OMe modified nucleotide
  source 1..22: mol_type = other RNA
ntgaaaggattcatcctccttt

SEQ ID NO: 371 - RNA, 22 nt, synthetic construct
  modified_base 1: mod_base = OTHER; note = Inverted abasic nucleotide
  modified_base 2..3: mod_base = OTHER; note = 2'-OMe modified nucleotide
  modified_base 11..13: mod_base = OTHER; note = 2'-OMe modified nucleotide
  modified_base 15..22: mod_base = OTHER; note = 2'-OMe modified nucleotide
  source 1..22: mol_type = other RNA
nctgaaaggattcatcctcctt

SEQ ID NO: 372 - RNA, 22 nt, synthetic construct
  modified_base 1: mod_base = OTHER; note = Inverted abasic nucleotide
  modified_base 2..5: mod_base = OTHER; note = 2'-OMe modified nucleotide
  modified_base 8: mod_base = OTHER; note = 2'-OMe modified nucleotide
  modified_base 10..11: mod_base = OTHER; note = 2'-OMe modified nucleotide
  modified_base 14..15: mod_base = OTHER; note = 2'-OMe modified nucleotide
  modified_base 21..22: mod_base = OTHER; note = 2'-OMe modified nucleotide
  source 1..22: mol_type = other RNA
nggccagcgccagctgaaagtt

SEQ ID NO: 373 - RNA, 21 nt, synthetic construct
  modified_base 20..21: mod_base = OTHER; note = 2'-OMe modified nucleotide
  source 1..21: mol_type = other RNA
tgaccagtgacaatgaccgtt

SEQ ID NO: 374 - RNA, 21 nt, synthetic construct
  modified_base 20..21: mod_base = OTHER; note = 2'-OMe modified nucleotide
  source 1..21: mol_type = other RNA
gaccagtgacaatgaccgctt

SEQ ID NO: 375 - RNA, 21 nt, synthetic construct
  modified_base 20..21: mod_base = OTHER; note = 2'-OMe modified nucleotide
  source 1..21: mol_type = other RNA
aggaggatgaatcctttcatt

SEQ ID NO: 376 - RNA, 21 nt, synthetic construct
  modified_base 20..21: mod_base = OTHER; note = 2'-OMe modified nucleotide
  source 1..21: mol_type = other RNA
ggaggatgaatcctttcagtt

SEQ ID NO: 377 - RNA, 21 nt, synthetic construct
  modified_base 20..21: mod_base = OTHER; note = 2'-OMe modified nucleotide
  source 1..21: mol_type = other RNA
ctttcagctggcgctggcctt

SEQ ID NO: 378 - RNA, 21 nt, synthetic construct
  modified_base 5: mod_base = OTHER; note = 2'-OMe modified nucleotide
  modified_base 11: mod_base = OTHER; note = 2'-OMe modified nucleotide
  modified_base 20..21: mod_base = OTHER; note = 2'-OMe modified nucleotide
  source 1..21: mol_type = other RNA
tgaccagtgacaatgaccgtt

SEQ ID NO: 379 - RNA, 21 nt, synthetic construct
  modified_base 4: mod_base = OTHER; note = 2'-OMe modified nucleotide
  modified_base 10: mod_base = OTHER; note = 2'-OMe modified nucleotide
  modified_base 20..21: mod_base = OTHER; note = 2'-OMe modified nucleotide
  source 1..21: mol_type = other RNA
gaccagtgacaatgaccgctt

SEQ ID NO: 380 - RNA, 21 nt, synthetic construct
  modified_base 18: mod_base = OTHER; note = 2'-OMe modified nucleotide
  modified_base 20..21: mod_base = OTHER; note = 2'-OMe modified nucleotide
  source 1..21: mol_type = other RNA
aggaggatgaatcctttcatt

SEQ ID NO: 381 - RNA, 21 nt, synthetic construct
  modified_base 17: mod_base = OTHER; note = 2'-OMe modified nucleotide
  modified_base 20..21: mod_base = OTHER; note = 2'-OMe modified nucleotide
  source 1..21: mol_type = other RNA
ggaggatgaatcctttcagtt

SEQ ID NO: 382 - RNA, 21 nt, synthetic construct
  modified_base 5: mod_base = OTHER; note = 2'-OMe modified nucleotide
  modified_base 20..21: mod_base = OTHER; note = 2'-OMe modified nucleotide
  source 1..21: mol_type = other RNA
ctttcagctggcgctggcctt

SEQ ID NO: 383 - RNA, 297 nt, synthetic construct
  source 1..297: mol_type = other RNA
gcggccgcttgtttgaatgaggcttcagtactttacagaatcgttgcctgcacatcttggaaacacttgctgggattacttcttcaggttaacccaacagaaggctcgagaaggtatattgctgttgacagtgagcgcggcggtcattgtcactggtcatagtgaagccacagatgtatgaccagtgacaatgaccgccttgcctactgcctcggaattcaaggggctactttaggagcaattatcttgtttactaaaactgaataccttgctatctctttgatacattggcgcgcc

SEQ ID NO: 384 - RNA, 97 nt, synthetic construct
  source 1..97: mol_type = other RNA
tgctgttgacagtgagcgcggcggtcattgtcactggtcatagtgaagccacagatgtatgaccagtgacaatgaccgccttgcctactgcctcgga

SEQ ID NO: 385 - DNA, 10 bp, synthetic construct
  source 1..10: mol_type = other DNA
attgcgcaat

1. A method of treating insulin resistance or obesity of a patient in need thereof, comprising administering a therapeutically effective amount of a short activating RNA (saRNA) targeting a CCAAT/enhancer binding protein alpha (C/EBPAα) transcript.

2. The method of claim 1, wherein the LDL level in liver cells of said patient is reduced.

3. The method of claim 1, wherein the triglyceride level in liver cells of said patient is reduced.

4. The method of claim 1, wherein the body weight of said patient is reduced.

5. The method of claim 1, wherein the liver size of said patient is reduced.

6. The method of claim 1, wherein the expression of FAT/CD36, SREBP1, DGAT2, CETP, FASN, PPARγ-CoA1α, PPARγ-CoA1β, or MLXIPL is reduced.

7. The method of claim 1, wherein the expression of LPL, LXD, ACACA, ACACB, APOC3, MTP, LDLR, PGC-1α, PGC-1β, PPARγ, or PPARα is increased.

8. The method of claim 1, wherein the white adipose tissue of said patient is reduced.

9. The method of claim 1, wherein the brown adipose tissue of said patient is activated.

10. The method of claim 1, wherein the body fat of said patient is reduced.

11. The method of claim 1, wherein the serum albumin level of said patient is increased.

12. The method of claim 1, wherein the saRNA comprises an antisense strand, wherein the antisense strand comprises SEQ ID. No. 318, 374, 2, 4, 6, 8, 10 or 12.

13. The method of claim 1, where the saRNA is administered with drugs that increase insulin sensitivity or treat type II diabetes mellitus, such as metformin, sulfonylurea, nonsulfonylurea secretagogues, a glucosidase inhibitors, thiazolidinediones, pioglitazone, rosiglitazone, glucagon-like peptide-I analog, and dipeptidyl peptidase-4 inhibitors or a combination thereof.
